(19) United States
(12) Patent Application Publication
(10) Pub. No.: US 2007/0059329 A1
(43) Pub. Date: Mar. 15, 2007

(54) Unexpected surface proteins in meningococcus

(76) Inventors: Nathalie Norais, Siena (IT); Guido Grandi, Milan (IT)

Correspondence Address: NOVARTIS VACCINES AND DIAGNOSTICS INC., CORPORATE INTELLECTUAL PROPERTY R338, P.O. BOX 8097, Emeryville, CA, 94662-8097, US

(21) Appl. No.: 10/535,168

(22) PCT Filed: Nov. 17, 2003
(86) PCT No.: PCT/IB03/06281

§ 371 Date: Jun. 29, 2006

(30) Foreign Application Priority Data
Nov. 15, 2002 (GB) 0226734.2
Mar. 27, 2003 (GB) 0307131.3

(51) Int. Cl. A61K 39/095; C07K 14/22

(52) U.S. Cl. 424/250.1; 530/350

(57) ABSTRACT

217 proteins have, contrary to expectations, been found in the membrane of Neisseria meningitidis. Of these 217, 76 in particular evaded all algorithmic methods for predicting membrane localisation. Existing knowledge of protein trafficking pathways in meningococcus does not explain how or why these proteins are located in the bacterial membrane e.g. there is no apparent biochemical reason for a DNA helicase or a chromosomal replication initiator protein to be found in the membrane. These 217 proteins are provided as membrane proteins.

### TECHNICAL FIELD

[0001] This invention is in the field of meningococcal biochemistry, in particular the trafficking and localisation of meningococcal proteins.

### BACKGROUND ART

[0002] The complete genome sequence of serogroup B N.meningitidis has been published [1] and has been subjected to analysis in order to identify candidate vaccine antigens [2]. The complete genome sequence of serogroup A N.meningitidis is also known [3].

[0003] Footnote 12 of reference 2 describes the authors' approach to antigen selection. Briefly, a first screening for coding capacity of the genome sequence was performed using computer programs included in the Wisconsin package version 10.0, Genetics Computer Group (GCG). BLASTX was used to classify ORFs as coding either for known cytoplasmic functions or for other functions. The cytoplasmic ORFs were “not further investigated” as candidate antigens.

[0004] A second screening step aimed at identifying putative proteins with a cellular localization spanning from the inner membrane to outside the bacterium was also used. This screening involved F-BLAST, FASTA, MOTIFS, FINDPATTERNS, and PSORT, as well as the ProDom, Pfam, and Blocks databases. ORFs were thus selected on the basis of features typical of surface-associated proteins such as transmembrane domains, leader peptides, homologies to known surface proteins, lipoprotein signature, outer membrane anchoring motifs, and host cell binding domains such as RGD.

[0005] In total, reference 2 identified 570 ORFs within the genome as candidate vaccine antigens. 98.8% of these selected serogroup B ORFs were also found and conserved in serogroup A, and 95.3% were found and conserved in N. gonorrhoeae.

[0006] This “reverse genomics” approach to vaccine candidate selection is undoubtedly powerful, and has been copied for other organisms [e.g. refs. 4 to 10], but it does not identify all surface-exposed proteins and vaccine candidates [11]. It is therefore an object of the invention to identify surface-exposed meningococcal proteins which are not identified by computer prediction methods.

### DISCLOSURE OF THE INVENTION

[0007] The invention is based on the discovery of 217 proteins which, contrary to expectations, are found in the membrane of Neisseria meningitidis. Of these 217, 76 in particular evade all algorithmic methods for predicting membrane localisation. Existing knowledge of protein trafficking pathways in meningococcus does not explain how or why these proteins are located in the bacterial membrane e.g. there is no apparent biochemical reason for a DNA helicase or a chromosomal replication initiator protein to be found in the membrane.

[0008] The 217 proteins are listed in Table I according to their ‘NMB’ numbering, which corresponds to the standardised nomenclature from reference 1. The NMB numbering can be used directly to query online databases e.g. a protein query of the NCBI Entrez system [12] using the term ‘NMB1506’ unequivocally identifies the Arginyl-tRNA synthetase of N.meningitidis (see FIG. 5), leading to a single amino acid sequence. Details of the DNA sequences which encode these proteins are similarly accessible from the online databases. The original release of a sequence in a database of choice (e.g. GenBank) may be preferred.

[0009] Although the online databases are the most convenient source of information concerning the 217 proteins of the invention, and the most likely to be consulted by the skilled person, for formal reasons the amino acid sequences are also provided in a sequence listing (SEQ ID NO^{s}: 1 to 217).

Proteins of the Invention

[0010] The invention provides a protein comprising an amino acid sequence selected from the group consisting of SEQ ID NO^{s}: 1 to 217.

[0011] It also provides a protein comprising an amino acid sequence which shares at least x% sequence identity with an amino acid sequence selected from the group consisting of SEQ ID NO^{s}: 1 to 217. Depending on the particular sequence, x is preferably 50% or more (e.g. 60%, 70%, 80%, 90%, 95%, 99% or more). These proteins include allelic variants, homologs, orthologs, paralogs, mutants etc. of SEQ ID NO^{s}: 1 to 217. Typically, 50% identity or more between two proteins is considered to be an indication of functional equivalence. Identity between proteins is preferably determined by the Smith-Waterman homology search algorithm as implemented in the MPSRCH program (Oxford Molecular), using an affine gap search with parameters gap open penalty=12 and gap extension penalty=1.

[0012] It is preferred that one or more of the differences these proteins compared to SEQ ID NO^{s}: 1 to 217 involves a conservative amino acid replacement i.e. replacement of one amino acid with another which has a related side chain. Genetically-encoded amino acids are generally divided into four families: (1) acidic i.e. aspartate, glutamate; (2) basic i.e. lysine, arginine, histidine; (3) non-polar i.e. alanine, valine, leucine, isoleucine, proline, phenylalanine, methionine, tryptophan; and (4) uncharged polar i.e. glycine, asparagine, glutamine, cysteine, serine, threonine, tyrosine. Phenylalanine, tryptophan, and tyrosine are sometimes classified jointly as aromatic amino acids. In general, substitution of single amino acids within these families does not have a major effect on the biological activity. Proteins of the invention may contain 1 or more (e.g. 2, 3, 4, 5, 6, 7, 8, 9, 10, 11, 12, 13, 14, 15, 16, 17, 18, 19, 20 or more) conservative mutations.

[0013] The invention further provides a protein comprising a fragment of an amino acid sequence selected from the group consisting of SEQ ID NO^{s}: 1 to 217. The fragment should comprise at least n consecutive amino acids from the sequence and, depending on the particular sequence, n is 7 or more (e.g. 8, 10, 12, 14, 16, 18, 20, 30, 40, 50, 75, 100, 150, 200 or more). Preferred fragments include: (a) fragments which comprise an epitope; (b) fragments common to two or more of SEQ IDs 1 to 217; (c) SEQ IDs 1 to 217 with 1 or more (e.g. 1, 2, 3, 4, 5, 6, 7, 8, 9, 10, 11, 12, 13, 14, 15, 16, 17, 18, 19, 20, 21, 22, 23, 24, 25, etc.) N-terminal residues deleted; (d) SEQ IDs 1 to 217 with 1 or more (e.g. 1, 2, 3, 4, 5, 6, 7, 8, 9, 10, 11, 12, 13, 14, 15, 16, 17, 18, 19, 20, 21, 22, 23, 24, 25, etc.) C-terminal residues deleted; (e) SEQ IDs 1 to 217 without their signal peptides; and (f) SEQ IDs 1 to 217 with the N-terminal deleted up to and including a poly-glycine sequence (i.e. Gly_{g}, where g≧3 e.g. 4, 5, 6, 7, 8, 9 or more), referred to as ‘ΔG’ proteins. These preferred fragments are not mutually exclusive e.g. a fragment could fall into category (a) and (b), or category (c) and (d), etc.

[0014] Proteins can be prepared by various means e.g. by chemical synthesis (at least in part), by digesting longer polypeptides using proteases, by translation from RNA, by purification from cell culture (e.g. from recombinant expression or from N.meningitidis culture). etc. Heterologous expression in E.coli is a preferred preparative route.

[0015] Proteins can take various forms (e.g. native, fusions, glycosylated, non-glycosylated, lipidated, disulfide bridges, etc.).

[0016] Proteins are preferably prepared in substantially pure form (i.e. substantially free from other Neisserial or host cell proteins) or substantially isolated form.

[0017] Proteins are preferably meningococcal proteins.

[0018] Proteins of the invention may be attached to a solid support. They may comprise a detectable label (e.g. a radioactive or fluorescent label, or a biotin label).

[0019] Proteins of the invention may be located within a lipid bilayer. The invention thus provides a lipid bilayer (e.g. a cell membrane, a liposome, a bacterial ghost, an OMV, a bleb, etc.) including a protein of the invention. The bilayer preferably does not include native membrane components such as porins (PorA in particular, class I outer membrane proteins (OMPs), class III OMPs, etc.), LOS, LPS, PilC, Omp85, opacity proteins (e.g. Opa & Opc), pilins (e.g. PilC, PilT, etc.), P64k, etc. Thus lipid bilayer immunogens can be provided which include the useful immunogenic proteins of the invention, but which do not include undesired components.

[0020] Preferred fusion proteins follow the approach set out in references 13 to 15 in which two or more (e.g. 3, 4, 5, 6 or more) Neisserial proteins are joined such that they are translated as a single polypeptide chain. In general, such hybrid proteins can be represented by the formula:
NH₂-A-[-X-L-]ₙ-B-COOH
wherein X is an amino acid sequence as defined above, L is an optional linker amino acid sequence, A is an optional N-terminal amino acid sequence, B is an optional C-terminal amino acid sequence, and n is an integer greater than 1. The value of n is between 2 and x, and the value of x is typically 3, 4, 5, 6, 7, 8, 9 or 10. Preferably n is 2, 3 or 4; it is more preferably 2 or 3; most preferably, n=2.

[0021] In some hybrid proteins, referred to as ‘tandem’ proteins, a -X- moiety has sequence identity to at least one of the other X moieties, as defined above e.g. X₁ is SEQ ID 1 and X₂ is a variant of X₁.

[0022] For X moieties other than X₁, it is preferred that the native leader peptide should be omitted. In one embodiment, the leader peptides will be deleted except for that of the -X- moiety located at the N-terminus of the hybrid protein i.e. the leader peptide of X₁ will be retained, but the leader peptides of X₂ . . . Xₙ will be omitted. This is equivalent to deleting all leader peptides and using the leader peptide of X₁ as moiety -A-.

[0023] For each n instances of [-X-L-], linker amino acid sequence -L- may be present or absent. For instance, when n=2 the hybrid may be NH₂-X₁-L₁-X₂-L₂-COOH, NH₂-X₁-X₂-COOH, NH₂-X₁-L₁-X₂-COOH, NH₂-X₁-X₂-L₂-COOH, etc. Linker amino acid sequence(s) -L- will typically be short (e.g. 20 or fewer amino acids i.e. 19, 18, 17, 16, 15, 14, 13, 12, 11, 10, 9, 8, 7, 6, 5, 4, 3, 2, 1). Examples include short peptide sequences which facilitate cloning, poly-glycine linkers (i.e. Glyₙ where n=2, 3, 4, 5, 6, 7, 8, 9, 10 or more), and histidine tags (i.e. Hisₙ where n=3, 4, 5, 6, 7, 8, 9, 10 or more). Other suitable linker amino acid sequences will be apparent to those skilled in the art. A useful linker is GSGGGG, with the Gly-Ser dipeptide being formed from a BamHI restriction site, thus aiding cloning and manipulation, and the Gly₄ tetrapeptide being a typical poly-glycine linker.

[0024] -A- is an optional N-terminal amino acid sequence. This will typically be short (e.g. 40 or fewer amino acids i.e. 39, 38, 37, 36, 35, 34, 33, 32, 31, 30, 29, 28, 27, 26, 25, 24, 23, 22, 21, 20, 19, 18, 17, 16, 15, 14, 13, 12, 11, 10, 9, 8, 7, 6, 5, 4, 3, 2, 1). Examples include leader sequences to direct protein trafficking, or short peptide sequences which facilitate cloning or purification (e.g. histidine tags i.e. Hisₙ where n=3, 4, 5, 6, 7, 8, 9, 10 or more). Other suitable N-terminal amino acid sequences will be apparent to those skilled in the art. If X₁ lacks its own N-terminus methionine, -A- may be a methionine residue.

[0025] -B- is an optional C-terminal amino acid sequence. This will typically be short (e.g. 40 or fewer amino acids i.e. 39, 38, 37, 36, 35, 34, 33, 32, 31, 30, 29, 28, 27, 26, 25, 24, 23, 22, 21, 20, 19, 18, 17, 16, 15, 14, 13, 12, 11, 10, 9, 8, 7, 6, 5, 4, 3, 2, 1). Examples include sequences to direct protein trafficking, short peptide sequences which facilitate cloning or purification (e.g. comprising histidine tags i.e. Hisₙ where n=3, 4, 5, 6, 7, 8, 9, 10 or more), or sequences which enhance protein stability. Other suitable C-terminal amino acid sequences will be apparent to those skilled in the art.

[0026] Within SEQ ID NO^{s}1 to 217, those marked with a ‘*’ in Table 1 are preferred, as are SEQ IDs 206 to 217. In Table 1, the 76 sequences marked ‘**’ are particularly preferred.

Nucleic Acids of the Invention

[0027] The invention provides nucleic acid encoding the proteins of the invention.

[0028] The invention also provides nucleic acid comprising sequences which share at least x% sequence identity with nucleic acid encoding a protein of the invention. Depending on the particular sequence, x is preferably 50% or more (e.g. 60%, 70%, 80%, 90%, 95%, 99% or more).

[0029] Furthermore, the invention provides nucleic acid which can hybridise to nucleic acid encoding a protein of the invention. Hybridisation reactions can be performed under conditions of different “stringency”. Conditions that increase stringency of a hybridisation reaction of widely known and published in the art. Examples of relevant conditions include (in order of increasing stringency): incubation temperatures of 25° C., 37° C., 50° C., 55° C. and 68° C.; buffer concentrations of 10×SSC, 6×SSC, 1×SSC, 0.1×SSC and their equivalents using other buffer systems; formamide concentrations of 0%, 25%, 50%, and 75%; incubation times from 5 minutes to 24 hours; 1, 2, or more washing steps; wash incubation times of 1, 2, or 15 minutes; and wash solutions of 6×SSC, 1×SSC, 0.1×SSC, or de-ionized water. In some embodiments, the isolated nucleic acid of the invention selectively hybridises under low stringency conditions; in other embodiments it selectively hybridises under intermediate stringency conditions; in other embodiments, it selectively hybridises under high stringency conditions. An exemplary set of low stringency hybridisation conditions is 50° C. and 10×SSC. An exemplary set of intermediate stringency hybridisation conditions is 55° C. and 1×SSC. An exemplary set of high stringent hybridisation conditions is 68° C. and 0.1×SSC.

[0030] Nucleic acid comprising fragments of nucleic acid encoding a protein of the invention are also provided. These should comprise at least n consecutive nucleotides from the coding sequences and, depending on the particular sequence, n is 10 or more (e.g. 12, 14, 15, 18, 20, 25, 30, 35, 40, 50, 75, 100, 200, 300 or more).

[0031] The invention provides nucleic acid comprising sequences complementary to those described above (e.g. for antisense or probing purposes).

[0032] Nucleic acid of the invention can, of course, be prepared in many ways e.g. by chemical synthesis (at least in part), by digesting longer polynucleotides using restriction enzymes, from genomic or cDNA libraries, from the organism itself etc.

[0033] Nucleic acid of the invention can take various forms (e.g. single-stranded, double-stranded, linear, circular, vectors, primers, probes etc.).

[0034] Nucleic acids of the invention may be attached to a solid support (e.g. a bead, plate, filter, film, slide, resin, etc.). Nucleic acids of the invention may include a detectable label (e.g. a radioactive or fluorescent label, or a biotin label). This is particularly useful where the polynucleotide is to be used in nucleic acid detection techniques e.g. where the nucleic acid is a primer or as a probe for use in techniques such as PCR, LCR, TMA, NASBA, bDNA, etc.

[0035] Nucleic acids of the invention are preferably meningococcal nucleic acids.

[0036] The term “nucleic acid” includes DNA, RNA, DNA/RNA hybrids, and DNA or RNA analogs, such as those containing modified backbones or bases, and also peptide nucleic acids (PNA) etc.

[0037] Nucleic acids of the invention may be isolated and obtained in substantial purity, generally as other than an intact chromosome. Usually, the polynucleotides will be obtained substantially free of other naturally-occurring nucleic acid sequences, generally being at least about 50% (by weight) pure, usually at least about 90% pure.

[0038] Nucleic acids can be used, for example: to produce polypeptides; as probes for the detection of nucleic acid in biological samples; to generate additional copies of the polynucleotides; to generate ribozymes or antisense oligonucleotides; and as single-stranded DNA probes or as triple-strand forming oligonucleotides etc.

[0039] The invention provides vectors comprising nucleotide sequences of the invention (e.g. cloning or expression vectors) and host cells transformed therewith.

Outer Membrane Vesicles (OMVs)

[0040] One of the various approaches to immunising against N.meningitidis infection is to use outer membrane vesicles (OMVs). An efficacious OMV vaccine against serogroup B has been produced by the Norwegian National Institute of Public Health [e.g. ref. 16] but, although this vaccine is safe and prevents meningococcal disease, its efficacy is limited to the strain used to make the vaccine.

[0041] To increase the efficacy of OMV vaccines, it has been proposed to supplement them with additional immunogens. Reference 17 discloses compositions comprising OMVs supplemented with transferrin binding proteins (e.g. TbpA and TbpB) and/or Cu,Zn-superoxide dismutase. Reference 18 discloses compositions comprising OMVs supplemented by various proteins.

[0042] The inventors have found that the portion of the proteome present in OMVs prepared from one strain of N.meningitidis can be very different from that of another strain. However, the proteins present in OMVs from any given strain must be compatible with the OMV environment, and so such proteins can be used to supplement OMVs from other strains without needing to be concerned that the proteins might lose immunogenicity, or that they might destabilise the OMVs, etc.

[0043] In general, therefore, the invention provides a composition comprising: (a) OMVs prepared from a first strain of N.meningitidis; and (b) one or more proteins which are present in OMVs prepared from a second strain of N. meningitidis, but which are not present in OMVs prepared from said first strain. Thus the invention allows the inter-strain reactivity of OMVs to be improved, without requiring the mixing of OMVs from different strains.

[0044] The protein(s) of component (b) can be included in the composition in various ways. For example: (i) they can be purified from the second strain and added to component (a); (ii) they can be expressed recombinantly, purified, and added to component (a); or (iii) the first strain can be engineered such that it expresses said protein(s), either from its chromosomal DNA or from extrachromosomal DNA (e.g. a plasmid), or such that existing expression of said protein(s) is up-regulated, or such that trafficking of said protein(s) already expressed by the first strain is altered to direct it/them to a different cellular location, thereby causing it/them to be present in OMVs. In situation (iii), the OMVs of component (a), prepared from the manipulated first strain, will already include the proteins of component (b), but these proteins are not present in OMVs prepared from the un-manipulated or wild-type first strain. Thus the invention provides a composition comprising OMVs prepared from a genetically modified first strain of N.meningitidis, wherein said OMVs include one or more proteins which are (a) not present in OMVs prepared from said first strain prior to its being genetically modified, but which are (b) present in OMVs prepared from a second strain of N.meningitidis.

[0045] The N.meningitidis strains are preferably from serogroup B of N.meningitidis.

[0046] Methods for preparing OMVs are well known [e.g. refs. 16 to 26]. also describe OMV preparations from meningococcus. A preferred method involves deoxycholate extraction.

[0047] The proteins present in component (b) will depend on the meningococcal strain used to prepare the OMVs of component (a). However, preferred proteins for inclusion in component (b) are: NMB0007, NMB0018, NMB0031, NMB0035, NMB0051, NMB0052, NMB0088, NMB0089, NMB0109, NMB0110, NMB0124, NMB0126, NMB0130, NMB0132, NMB0138, NMB0139, NMB0143, NMB0154, NMB0157, NMB0168, NMB0171, NMB0182, NMB0204, NMB0214, NMB0219, NMB0280, NMB0313, NMB0336, NMB0359, NMB0375, NMB0382, NMB0387, NMB0410, NMB0423, NMB0426, NMB0427, NMB0461, NMB0462, NMB0477, NMB0546, NMB0554, NMB0586, NMB0595, NMB0604, NMB0610, NMB0617, NMB0618, NMB0623, NMB0626, NMB0631, NMB0634, NMB0638, NMB0652, NMB0663, NMB0703, NMB0757, NMB0758, NMB0763, NMB0787, NMB0854, NMB0875, NMB0876, NMB0889, NMB0920, NMB0943, NMB0944, NMB0946, NMB0954, NMB0955, NMB0957, NMB0959, NMB0983, NMB1011, NMB1046, NMB1053, NMB1055, NMB1124, NMB1126, NMB1127, NMB1131, NMB1153, NMB1162, NMB1164, NMB1165, NMB1191, NMB1199, NMB1201, NMB1228, NMB1240, NMB1252, NMB1285, NMB1301, NMB1313, NMB1323, NMB1332, NMB1339, NMB1341, NMB1342, NMB1358, NMB1392, NMB1429, NMB1437, NMB1445, NMB1457, NMB1460, NMB1497, NMB1506, NMB1518, NMB1533, NMB1540, NMB1554, NMB1567, NMB1572, NMB1574, NMB1576, NMB1577, NMB1594, NMB1612, NMB1642, NMB1668, NMB1684, NMB1710, NMB1714, NMB1762, NMB1796, NMB1799, NMB1808, NMB1812, NMB1849, NMB1854, NMB1855, NMB1861, NMB1869, NMB1874, NMB1903, NMB1921, NMB1934, NMB1936, NMB1946, NMB1949, NMB1953, NMB1969, NMB1972, NMB1988, NMB1998, NMB2039, NMB2069, NMB2086, NMB2096, NMB2101, NMB2102, NMB2103, NMB2129, NMB2134, NMB2138, NMB2154 and NMB2159. Particularly preferred are NMB0182, NMB0382, NMB0634, NMB0763, NMB1126, NMB1342, NMB1429, NMB1799 and NMB2039.

[0048] It will be appreciated that these references to NMB proteins are based on the genomic sequence of serogroup B strain MC58 [1], and that the corresponding proteins in any particular strain, and the genes encoding them, can readily be determined.

Compositions

[0049] According to a further aspect, the invention provides compositions comprising protein and/or nucleic acid and/or OMVs according to the invention. These compositions are preferably immunogenic compositions, such as vaccines, and are suitable for immunisation and vaccination purposes. Vaccines of the invention may be prophylactic or therapeutic, and will typically comprise an antigen which can induce antibodies which are (a) capable of binding to a meningococcal membrane component and/or (b) bactericidal against meningococcus.

[0050] Compositions of the invention will generally be administered directly to a patient. Direct delivery may be accomplished by parenteral injection (e.g. subcutaneously, intraperitoneally, intravenously, intramuscularly, or to the interstitial space of a tissue), or by rectal, oral, vaginal, topical, transdermal, intranasal, ocular, aural, or pulmonary or other mucosal administration. Electrical methods may be used to for delivery e.g. delivery via electroporation.

[0051] The invention may be used to elicit systemic and/or mucosal immunity.

[0052] Dosage treatment can be a single dose schedule or a multiple dose schedule.

[0053] The immunogenic composition of the invention will generally include a pharmaceutically acceptable carrier, which can be any substance that does not itself induce the production of antibodies harmful to the patient receiving the composition, and which can be administered without undue toxicity. Suitable carriers can be large, slowly-metabolised macromolecules such as proteins, polysaccharides, polylactic acids, polyglycolic acids, polymeric amino acids, amino acid copolymers, and inactive virus particles. Such carriers are well known to those of ordinary skill in the art. Pharmaceutically acceptable carriers can include liquids such as water, saline, glycerol and ethanol. Auxiliary substances, such as wetting or emulsifying agents, pH buffering substances, and the like, can also be present in such vehicles. Liposomes are suitable carriers. A thorough discussion of pharmaceutical carriers is available in ref. 27.

[0054] Neisserial infections affect various areas of the body and so the compositions of the invention may be prepared in various forms. For example, the compositions may be prepared as injectables, either as liquid solutions or suspensions. Solid forms suitable for solution in, or suspension in, liquid vehicles. prior to injection can also be prepared. The composition may be prepared for topical administration e.g. as an ointment, cream or powder. The composition be prepared for oral administration e.g. as a tablet or capsule, or as a syrup (optionally flavoured). The composition may be prepared for pulmonary administration e.g. as an inhaler, using a fine powder or a spray. The composition may be prepared as a suppository or pessary. The composition may be prepared for nasal, aural or ocular administration e.g. as drops.

[0055] The composition is preferably sterile. It is preferably pyrogen-free. It is preferably buffered e.g. at between pH 6 and pH 8, generally around pH 7.

Further Components of Compositions

[0056] Immunogenic compositions comprise an immunologically effective amount of immunogen, as well as any other of other specified components, as needed. By ‘immunologically effective amount’, it is meant that the administration of that amount to an individual, either in a single dose or as part of a series, is effective for treatment or prevention. This amount varies depending upon the health and physical condition of the individual to be treated, age, the taxonomic group of individual to be treated (e.g. non-human primate, primate, etc.), the capacity of the individual's immune system to synthesise antibodies, the degree of protection desired, the formulation of the vaccine, the treating doctor's assessment of the medical situation, and other relevant factors. It is expected that the amount will fall in a relatively broad range that can be determined through routine trials. Dosage treatment may be a single dose schedule or a multiple dose schedule (e.g. including booster doses). The composition may be administered in conjunction with other immunoregulatory agents.

[0057] The composition will generally comprise an adjuvant. Preferred adjuvants to enhance effectiveness of the composition include, but are not limited to: (A) MF59 (5% Squalene, 0.5% Tween 80, and 0.5% Span 85, formulated into submicron particles using a microfluidizer) [see Chapter 10 of ref. 28; see also ref. 29]; (B) microparticles (i.e. a particle of ˜100 nm to ˜150 μm in diameter, more preferably ˜200 nm to ˜30 μm in diameter, and most preferably ˜500 nm to ˜10 μm in diameter) formed from materials that are biodegradable and non-toxic (e.g. a poly(α-hydroxy acid), a polyhydroxybutyric acid, a polyorthoester, a polyanhydride, a polycaprolactone etc.), with poly(lactide-co-glycolide) being preferred (‘PLG’), optionally being charged surface (e.g. by adding a cationic, anionic, or nonionic detergent such as SDS (negative) or CTAB (positive) [e.g. refs. 30 & 31]); (C) liposomes [see Chapters 13 and 14 of ref. 28]; (D) ISCOMs [see Chapter 23 of ref. 28], which may be devoid of additional detergent [32]; (E) SAF, containing 10% Squalane, 0.4% Tween 80, 5% pluronic-block polymer L121, and thr-MDP, either microfluidized into a submicron emulsion or vortexed to generate a larger particle size emulsion [see Chapter 12 of ref. 28]; (F) Ribi™ adjuvant system (RAS), (Ribi Immunochem) containing 2% Squalene, 0.2% Tween 80, and one or more bacterial cell wall components from the group consisting of monophosphorylipid A (MPL), trehalose dimycolate (TDM), and cell wall skeleton (CWS), preferably MPL+CWS (Detox™); (G) saponin adjuvants, such as QuilA or QS21 [see Chapter 22 of ref. 28], also known as Stimulon™; (H) chitosan [e.g. 33]; (I) complete Freund's adjuvant (CFA) and incomplete Freund's adjuvant (IFA); (J) cytokines, such as interleukins (e.g. IL-1, IL-2, IL-4, IL-5, IL-6, IL-7, IL-12, etc.), interferons (e.g. interferon-γ), macrophage colony stimulating factor, tumor necrosis factor, etc. [see Chapters 27 & 28 of ref. 28], RC529; (K) a saponin (e.g. QS21)+3dMPL+IL-12 (optionally+a sterol) [34]; (L) monophosphoryl lipid A (MPL) or 3-O-deacylated MPL (3dMPL) [e.g. chapter 21 of ref. 28]; (M) combinations of 3dMPL with, for example, QS21 and/or oil-in-water emulsions [35]; (N) oligonucleotides comprising CpG motifs [36] i.e. containing at least one CG dinucleotide, with 5-methylcytosine optionally being used in place of cytosine; (O) a polyoxyethylene ether or a polyoxyethylene ester [37]; (P) a polyoxyethylene sorbitan ester surfactant in combination with an octoxynol [38] or a polyoxyethylene alkyl ether or ester surfactant in combination with at least one additional non-ionic surfactant such as an octoxynol [39]; (Q) an immunostimulatory oligonucleotide (e.g. a CpG oligonucleotide) and a saponin [40]; (R) an immunostimulant and a particle of metal salt [41]; (S) a saponin and an oil-in-water emulsion [42]; (T) E.coli heat-labile enterotoxin (“LT”), or detoxified mutants thereof, such as the K63 or R72 mutants [e.g. Chapter 5 of ref. 43]; (U) cholera toxin (“CT”), or detoxified mutants thereof [e.g. Chapter 5 of ref. 43]; (V) double-stranded RNA; (W) aluminium salts, such as aluminium hydroxides (including oxyhydroxides), aluminium phosphates (including hydroxyphosphates), aluminium sulfate, etc [Chapters 8 & 9 in ref. 44]; (X) monophosphoryl lipid A mimics, such as aminoalkyl glucosaminide phosphate derivatives e.g. RC-529 [45]; and (Y) other substances that act as immunostimulating agents to enhance the effectiveness of the composition [e.g. see Chapter 7 of ref. 28], such as calcium phosphate. Aluminium salts (aluminium phosphates and particularly hydroxyphosphates, and/or hydroxides and particularly oxyhydroxide) are preferred adjuvants for parenteral immunisation. Toxin mutants are preferred mucosal adjuvants.

[0058] Muramyl peptides include N-acetyl-muramyl-L-threonyl-D-isoglutamine (thr-MDP), N-acetyl-normuramyl-L-alanyl-D-isoglutamine (nor-MDP), N-acetylmuramyl-L-alanyl-D-isoglutaminyl-L-alanine-2-(1′-2′-dipalmitoyl-sn-glycero-3-hydroxyphosphoryloxy)-ethylamine MTP-PE), etc.

[0059] Compositions of the invention may comprise antigens (e.g. protective antigens against N.meningitidis or against other organisms) in addition to the proteins mentioned above e.g. DTP antigens, Hib antigen etc. The composition may comprise one or more of the following further antigens:
[0060] antigens from Helicobacter pylori such as CagA [46 to 49], VacA [50, 51], NAP [52, 53, 54], HopX [e.g. 55], HopY [e.g. 55] and/or urease.
[0061] a saccharide antigen from N.meningitidis serogroup A, C, W135 and/or Y, such as the oligosaccharide disclosed in ref. 56 from serogroup C [see also ref. 57] or the oligosaccharides of ref. 58.
[0062] a saccharide antigen from Streptococcus pneumoniae [e.g. 59, 60, 61].
[0063] an antigen from hepatitis A virus, such as inactivated virus [e.g. 62, 63].
[0064] an antigen from hepatitis B virus, such as the surface and/or core antigens [e.g. 63, 64].
[0065] an antigen from Bordetella pertussis, such as pertussis holotoxin (PT) and filamentous haemagglutinin (FHA) from B. pertussis, optionally also in combination with pertactin and/or agglutinogens 2 and 3 [e.g. refs. 65 & 66].
[0066] a diphtheria antigen, such as a diphtheria toxoid [e.g. chapter 3 of ref. 67] e.g. the CRM₁₉₇ mutant [e.g. 68].
[0067] a tetanus antigen, such as a tetanus toxoid [e.g. chapter 4 of ref. 87].
[0068] a saccharide antigen from Haemophilus influenzae B [e.g. 57].
[0069] an antigen from hepatitis C virus [e.g. 69].
[0070] an antigen from N.gonorrhoeae [e.g. 70, 71, 72, 73].
[0071] an antigen from Chlamydia pneunmoniae [e.g. refs. 74 to 80].
[0072] an antigen from Chlamydia trachomatis [e.g. 81].
[0073] an antigen from Porphyromonas gingivalis [e.g. 82].
[0074] polio antigen(s) [e.g. 83, 84] such as IPV.
[0075] rabies antigen(s) [e.g. 85] such as lyophilised inactivated virus [e.g. 86, RabAvert™].
[0076] measles, mumps and/or rubella antigens [e.g. chapters 9, 10 & 11 of ref. 87].
[0077] influenza antigen(s) [e.g. chapter 19 of ref. 87], such as the haemagglutinin and/or neuraminidase surface proteins.
[0078] an antigen from Moraxella catarrhalis [e.g. 88].
[0079] an protein antigen from Streptococcus agalactiae (group B streptococcus) [e.g. 89, 90].
[0080] a saccharide antigen from Streptococcus agalactiae (group B streptococcus).
[0081] an antigen from Streptococcus pyogenes (group A streptococcus) [e.g. 90, 91, 92].
[0082] an antigen from Staphylococcus aureus [e.g. 93].
[0083] an antigen from Bacillus anthracis [e.g. 94, 95, 96].
[0084] an antigen from a virus in the flaviviridae family (genus flavivirus), such as from yellow fever virus, Japanese encephalitis virus, four serotypes of Dengue viruses, tick-borne encephalitis virus, West Nile virus.
[0085] a pestivirus antigen, such as from classical porcine fever virus, bovine viral diarrhoea virus, and/or border disease virus.
[0086] a parvovirus antigen e.g. from parvovirus B19.
[0087] a prion protein (e.g. the CJD prion protein)
[0088] an amyloid protein, such as a beta peptide [97]
[0089] a cancer antigen, such as those listed in Table 1 of ref. 98 or in tables 3 & 4 of ref. 99.

[0090] The composition may comprise one or more of these further antigens.

[0091] Toxic protein antigens may be detoxified where necessary (e.g. detoxification of pertussis toxin by chemical and/or genetic means [66]).

[0092] Where a diphtheria antigen is included in the composition it is preferred also to include tetanus antigen and pertussis antigens. Similarly, where a tetanus antigen is included it is preferred also to include diphtheria and pertussis antigens. Similarly, where a pertussis antigen is included it is preferred also to include diphtheria and tetanus antigens. DTP combinations are thus preferred.

[0093] Saccharide antigens are preferably in the form of conjugates. Carrier proteins for the conjugates include the N.meningitidis outer membrane protein [100], synthetic peptides [101,102], heat shock proteins [103,104], pertussis proteins [105,106], protein D from H.influenzae [107], cytokines [108], lymphokines [108], streptococcal proteins, hormones [108], growth factors [108], toxin A or B from C.difficile [109], iron-uptake proteins [110], etc. A preferred carrier protein is the CRM197 diphtheria toxoid [111].

[0094] Antigens in the composition will typically be present at a concentration of at least 1 μg/ml each. In general, the concentration of any given antigen will be sufficient to elicit an immune response against that antigen.

[0095] Immunogenic compositions of the invention may be used therapeutically (i.e. to treat an existing infection) or prophylactically (i.e. to prevent future infection).

[0096] As an alternative to using proteins antigens in the immunogenic compositions of the invention, nucleic acid (preferably DNA e.g. in the form of a plasmid) encoding the antigen may be used.

Medical Methods etc.

[0097] The invention also provides nucleic acids or proteins or OMVs of the invention, or antibodies which bind to proteins of the invention, for use as medicaments (e.g. as vaccines). It also provides the use of nucleic acid or protein or OMVs according to the invention in the manufacture of a medicament (e.g. a vaccine or an immunogenic composition) for treating or preventing infection due to a Neisseria. This will generally be N.meningitidis but, due to inter-species cross-reactivity, it may also be N.gonorrhoeae.

[0098] The invention also provides a method of treating (e.g. immunising) a patient (e.g. a human), comprising administering to the patient a therapeutically effective amount of nucleic acid and/or protein and/or OMVs according to the invention.

[0099] The invention also provides a method of raising antibodies in an animal, comprising administering to the patient an immunologically effective amount of nucleic acid and/or protein and/or OMVs according to the invention.

[0100] The invention also provides a method of detecting N.meningitidis bacteria in a sample, comprising the steps of: (a) contacting an antibody (e.g. monoclonal or polyclonal) which binds to a protein of the invention with a biological sample under conditions suitable for the formation of an antibody-antigen complexes; and (b) detecting said complexes. The method is particularly suitable for detecting intact bacteria because the proteins of the invention are present in the membrane. If the correct protein is used, it is also useful for distinguishing between N.meningitidis strains.

[0101] The invention also provides nucleic acids or proteins or OMVs of the invention, or antibodies which bind to proteins of the invention, for use as diagnostic reagents. It also provides the use of nucleic acid or protein or OMVs according to the invention, or antibodies which bind to proteins of the invention, in the manufacture of a reagent for diagnosing infection due to a Neisseria.

[0102] The invention also provides a method for investigating N.meningitidis, wherein the method includes a step of performing 2D electrophoresis on a membrane fraction from the bacterium.

Techniques

[0103] A summary of standard techniques and procedures which may be employed in order to perform the invention (e.g. to utilise the disclosed sequences for immunisation or diagnosis) follows. This summary is not a limitation on the invention but, rather, gives examples that may be used, but are not required.

General

[0104] The practice of the present invention will employ, unless otherwise indicated, conventional techniques of molecular biology, microbiology, recombinant DNA, and immunology, which are within the skill of the art.

[0105] Such techniques are explained fully in the literature e.g. Sambrook Molecular Cloning; A Laboratory Manual, Second Edition (1989) and Third Edition (2001); DNA Cloning, Volumes I and ii (D. N Glover ed. 1985); Oligonucleotide Synthesis (M. J. Gait ed, 1984); Nucleic Acid Hybridization (B. D. Hames & S. J. Higgins eds. 1984); Transcription and Translation (B. D. Hames & S. J. Higgins eds. 1984); Animal Cell Culture (R. I. Freshney ed. 1986); Immobilized Cells and Enzymes (IRL Press, 1986); B. Perbal, A Practical Guide to Molecular Cloning (1984); the Methods in Enzymology series (Academic Press, Inc.), especially volumes 154 & 155; Gene Transfer Vectors for Mammalian Cells (J. H. Miller and M. P. Calos eds. 1987, Cold Spring Harbor Laboratory); Mayer and Walker, eds. (1987), Immunochemical Methods in Cell and Molecular Biology (Academic Press, London); Scopes, (1987) Protein Purification: Principles and Practice, Second Edition (Springer-Verlag, N.Y.), and Handbook of Experimental Immunology, Volumes I-IV (D. M. Weir and C. C. Blackwell eds 1986).

[0106] Standard abbreviations for nucleotides and amino acids are used in this specification.

Definitions

[0107] A composition containing X is “substantially free of” Y when at least 85% by weight of the total X+Y in the composition is X. Preferably, X comprises at least about 90% by weight of the total of X+Y in the composition, more preferably at least about 95% or even 99% by weight.

[0108] The term “comprising” means “including” as well as “consisting” e.g. a composition “comprising” X may consist exclusively of X or may include something additional to X, such as X+Y.

[0109] The term “heterologous” refers to two biological components that are not found together in nature. The components may be host cells, genes, or regulatory regions, such as promoters. Although the heterologous components are not found together in nature, they can function together, as when a promoter heterologous to a gene is operably linked to the gene. Another example is where a Neisserial sequence is heterologous to a mouse host cell. A further examples would be two epitopes from the same or different proteins which have been assembled in a single protein in an arrangement not found in nature.

[0110] An “origin of replication” is a polynucleotide sequence that initiates and regulates replication of polynucleotides, such as an expression vector. The origin of replication behaves as an autonomous unit of polynucleotide replication within a cell, capable of replication under its own control. An origin of replication may be needed for a vector to replicate in a particular host cell. With certain origins of replication, an expression vector can be reproduced at a high copy number in the presence of the appropriate proteins within the cell. Examples of origins are the autonomously replicating sequences, which are effective in yeast; and the viral T-antigen, effective in COS-7 cells. A “mutant” sequence is defined as DNA, RNA or amino acid sequence differing from but having sequence identity with the native or disclosed sequence. Depending on the particular sequence, the degree of sequence identity between the native or disclosed sequence and the mutant sequence is preferably greater than 50% (e.g. 60%, 70%, 80%, 90%, 95%, 99% or more, calculated using the Smith-Waterman algorithm as described above). As used herein, an “allelic variant” of a nucleic acid molecule, or region, for which nucleic acid sequence is provided herein is a nucleic acid molecule, or region, that occurs essentially at the same locus in the genome of another or second isolate, and that, due to natural variation caused by, for example, mutation or recombination, has a similar but not identical nucleic acid sequence. A coding region allelic variant typically encodes a protein having similar activity to that of the protein encoded by the gene to which it is being compared. An allelic variant can also comprise an alteration in the 5′ or 3′ untranslated regions of the gene, such as in regulatory control regions (e.g. see U.S. Pat. No. 5,753,235).

Expression Systems

[0111] The Neisserial nucleotide sequences can be expressed in a variety of different expression systems; for example those used with mammalian cells, baculoviruses, plants, bacteria, and yeast.

i. Mammalian Systems

[0112] Mammalian expression systems are known in the art. A mammalian promoter is any DNA sequence capable of binding mammalian RNA polymerase and initiating the downstream (3′) transcription of a coding sequence (e.g. structural gene) into mRNA. A promoter will have a transcription initiating region, which is usually placed proximal to the 5′ end of the coding sequence, and a TATA box, usually located 25-30 base pairs (bp) upstream of the transcription initiation site. The TATA box is thought to direct RNA polymerase II to begin RNA synthesis at the correct site. A mammalian promoter will also contain an upstream promoter element, usually located within 100 to 200 bp upstream of the TATA box. An upstream promoter element determines the rate at which transcription is initiated and can act in either orientation [Sambrook et al. (1989) “Expression of Cloned Genes in Mammalian Cells.” In Molecular Cloning: A Laboratory Manual, 2nd ed.].

[0113] Mammalian viral genes are often highly expressed and have a broad host range; therefore sequences encoding mammalian viral genes provide particularly useful promoter sequences. Examples include the SV40 early promoter, mouse mammary tumor virus LTR promoter, adenovirus major late promoter (Ad MLP), and herpes simplex virus promoter. In addition, sequences derived from non-viral genes, such as the murine metallotheionein gene, also provide useful promoter sequences. Expression may be either constitutive or regulated (inducible), depending on the promoter can be induced with glucocorticoid in hormone-responsive cells.

[0114] The presence of an enhancer element (enhancer), combined with the promoter elements described above, will usually increase expression levels. An enhancer is a regulatory DNA sequence that can stimulate transcription up to 1000-fold when linked to homologous or heterologous promoters, with synthesis beginning at the normal RNA start site. Enhancers are also active when they are placed upstream or downstream from the transcription initiation site, in either normal or flipped orientation, or at a distance of more than 1000 nucleotides from the promoter [Maniatis et al. (1987) Science 236:1237; Alberts et al. (1989) Molecular Biology of the Cell, 2nd ed.]. Enhancer elements derived from viruses may be particularly useful, because they usually have a broader host range. Examples include the SV40 early gene enhancer [Dijkema et al (1985) EMBO J. 4:761] and the enhancer/promoters derived from the long terminal repeat (LTR) of the Rous Sarcoma Virus [Gorman et al. (1982) PNAS USA 79:6777] and from human cytomegalovirus [Boshart et al. (1985) Cell 41:521]. Additionally, some enhancers are regulatable and become active only in the presence of an inducer, such as a hormone or metal ion [Sassone-Corsi and Borelli (1986) Trends Genet. 2:215; Maniatis et al. (1987) Science 236:1237].

[0115] A DNA molecule may be expressed intracellularly in mammalian cells. A promoter sequence may be directly linked with the DNA molecule, in which case the first amino acid at the N-terminus of the recombinant protein will always be a methionine, which is encoded by the ATG start codon. If desired, the N-terminus may be cleaved from the protein by in vitro incubation with cyanogen bromide.

[0116] Alternatively, foreign proteins can also be secreted from the cell into the growth media by creating chimeric DNA molecules that encode a fusion protein comprised of a leader sequence fragment that provides for secretion of the foreign protein in mammalian cells. Preferably, there are processing sites encoded between the leader fragment and the foreign gene that can be cleaved either in vivo or in vitro. The leader sequence fragment usually encodes a signal peptide comprised of hydrophobic amino acids which direct the secretion of the protein from the cell. The adenovirus triparite leader is an example of a leader sequence that provides for secretion of a foreign protein in mammalian cells.

[0117] Usually, transcription termination and polyadenylation sequences recognized by mammalian cells are regulatory regions located 3′ to the translation stop codon and thus, together with the promoter elements, flank the coding sequence. The 3′ terminus of the mature mRNA is formed by site-specific post-transcriptional cleavage and polyadenylation [Birnstiel et al. (1985) Cell 41:349; Proudfoot and Whitelaw (1988) “Termination and 3′ end processing of eukaryotic RNA. In Transcription and splicing (ed. B. D. Hames and D. M. Glover); Proudfoot (1989) Trends Biochem. Sci. 14:105]. These sequences direct the transcription of an mRNA which can be translated into the polypeptide encoded by the DNA. Examples of transcription terminater/polyadenylation signals include those derived from SV40 [Sambrook et al (1989) “Expression of cloned genes in cultured mammalian cells.” In Molecular Cloning: A Laboratory Manual].

[0118] Usually, the above described components, comprising a promoter, polyadenylation signal, and transcription termination sequence are put together into expression constructs. Enhancers, introns with functional splice donor and acceptor sites, and leader sequences may also be included in an expression construct, if desired. Expression constructs are often maintained in a replicon, such as an extrachromosomal element (e.g. plasmids) capable of stable maintenance in a host, such as mammalian cells or bacteria. Mammalian replication systems include those derived from animal viruses, which require trans-acting factors to replicate. For example, plasmids containing the replication systems of papovaviruses, such as SV40 [Gluzman (1981) Cell 23:175] or polyomavirus, replicate to extremely high copy number in the presence of the appropriate viral T antigen. Additional examples of mammalian replicons include those derived from bovine papillomavirus and Epstein-Barr virus. Additionally, the replicon may have two replicaton systems, thus allowing it to be maintained, for example, in mammalian cells for expression and in a prokaryotic host for cloning and amplification. Examples of such mammalian-bacteria shuttle vectors include pMT2 [Kaufinan et al. (1989) Mol. Cell. Biol. 9:946] and pHEBO [Shimizu et al. (1986) Mol. Cell. Biol. 6:1074].

[0119] The transformation procedure used depends upon the host to be transformed. Methods for introduction of heterologous polynucleotides into mammalian cells are known in the art and include dextran-mediated transfection, calcium phosphate precipitation, polybrene-mediated transfection, protoplast fusion, electroporation, encapsulation of polynucleotide(s) in liposomes, direct microinjection of the DNA into nuclei.

[0120] Mammalian cell lines available as hosts for expression are known in the art and include many immortalized cell lines available from the American Type Culture Collection (ATCC), including but not limited to, Chinese hamster ovary (CHO) cells, HeLa cells, baby hamster kidney (BHK) cells, monkey kidney cells (COS), human hepatocellular carcinoma cells (e.g. Hep G2), and a number of other cell lines.

ii. Baculovirus Systems

[0121] The polynucleotide encoding the protein can also be inserted into a suitable insect expression vector, and is operably linked to the control elements within that vector. Vector construction employs techniques which are known in the art. Generally, the components of the expression system include a transfer vector, usually a bacterial plasmid, which contains both a fragment of the baculovirus genome, and a convenient restriction site for insertion of the heterologous gene or genes to be expressed; a wild type baculovirus with a sequence homologous to the baculovirus-specific fragment in the transfer vector (this allows for the homologous recombination of the heterologous gene in to the baculovirus genome); and appropriate insect host cells and growth media.

[0122] After inserting the DNA sequence encoding the protein into the transfer vector, the vector and the wild type viral genome are transfected into an insect host cell where the vector and viral genome are allowed to recombine. The packaged recombinant virus is expressed and recombinant plaques are identified and purified. Materials and methods for baculovirus/insect cell expression systems are commercially available in kit form from, inter alia, Invitrogen, San Diego Calif. (“MaxBac” kit). These techniques are generally known to those skilled in the art and fully described in Summers and Smith, Texas Agricultural Experiment Station Bulletin No. 1555 (1987) (hereinafter “Summers and Smith”).

[0123] Prior to inserting the DNA sequence encoding the protein into the baculovirus genome, the above described components, comprising a promoter, leader (if desired), coding sequence of interest, and transcription termination sequence, are usually assembled into an intermediate transplacement construct (transfer vector). This construct may contain a single gene and operably linked regulatory elements; multiple genes, each with its owned set of operably linked regulatory elements; or multiple genes, regulated by the same set of regulatory elements. Intermediate transplacement constructs are often maintained in a replicon, such as an extrachromosomal element (e.g. plasmids) capable of stable maintenance in a host, such as a bacterium. The replicon will have a replication system, thus allowing it to be maintained in a suitable host for cloning and amplification.

[0124] Currently, the most commonly used transfer vector for introducing foreign genes into AcNPV is pAc373. Many other vectors, known to those of skill in the art, have also been designed. These include, for example, pVL985 (which alters the polyhedrin start codon from ATG to ATT, and which introduces a BamHI cloning site 32 basepairs downstream from the ATT; see Luckow and Summers, Virology (1989) 17:31.

[0125] The plasmid usually also contains the polyhedrin polyadenylation signal (Miller et al. (1988) Ann. Rev. Microbiol., 42:177) and a prokaryotic ampicillin-resistance (amp) gene and origin of replication for selection and propagation in E. coli.

[0126] Baculovirus transfer vectors usually contain a baculovirus promoter. A baculovirus promoter is any DNA sequence capable of binding a baculovirus RNA polymerase and initiating the downstream (5′ to 3′) transcription of a coding sequence (e.g. structural gene) into mRNA. A promoter will have a transcription initiation region which is usually placed proximal to the 5′ end of the coding sequence. This transcription initiation region usually includes an RNA polymerase binding site and a transcription initiation site. A baculovirus transfer vector may also have a second domain called an enhancer, which, if present, is usually distal to the structural gene. Expression may be either regulated or constitutive.

[0127] Structural genes, abundantly transcribed at late times in a viral infection cycle, provide particularly useful promoter sequences. Examples include sequences derived from the gene encoding the viral polyhedron protein, Friesen et al., (1986) “The Regulation of Baculovirus Gene Expression,” in: The Molecular Biology of Baculoviruses (ed. Walter Doerfler); EPO Publ. Nos. 127 839 and 155 476; and the gene encoding the p10 protein, Vlak et al., (1988), J. Gen. Virol. 69:765.

[0128] DNA encoding suitable signal sequences can be derived from genes for secreted insect or baculovirus proteins, such as the baculovirus polyhedrin gene (Carbonell et al. (1988) Gene, 73:409). Alternatively, since the signals for mammalian cell posttraslational modifications (such as signal peptide cleavage, proteolytic cleavage, and phosphorylation) appear to be recognized by insect cells, and the signals required for secretion and nuclear accumulation also appear to be conserved between the invertebrate cells and vertebrate cells, leaders of non-insect origin, such as those derived from genes encoding human α-interferon, Maeda et al., (1985), Nature 315:592; human gastrin-releasing peptide, Lebacq-Verheyden et al., (1988), Molec. Cell. Biol. 8:3129; human IL-2, Smith et al., (1985) Proc. Nat'l Acad. Sci. USA, 82:8404; mouse IL-3, (Miyajima et al., (1987) Gene 58:273; and human glucocerebrosidase, Martin et al. (1988) DNA, 7:99, can also be used to provide for secretion in insects.

[0129] A recombinant polypeptide or polyprotein may be expressed intracellularly or, if it is expressed with the proper regulatory sequences, it can be secreted. Good intracellular expression of nonfused foreign proteins usually requires heterologous genes that ideally have a short leader sequence containing suitable translation initiation signals preceding an ATG start signal. If desired, methionine at the N-terminus may be cleaved from the mature protein by in vitro incubation with cyanogen bromide.

[0130] Alternatively, recombinant polyproteins or proteins which are not naturally secreted can be secreted from the insect cell by creating chimeric DNA molecules that encode a fusion protein comprised of a leader sequence fragment that provides for secretion of the foreign protein in insects. The leader sequence fragment usually encodes a signal peptide comprised of hydrophobic amino acids which direct the translocation of the protein into the endoplasmic reticulum.

[0131] After insertion of the DNA sequence and/or the gene encoding the expression product precursor of the protein, an insect cell host is co-transformed with the heterologous DNA of the transfer vector and the genomic DNA of wild type baculovirus—usually by co-transfection. The promoter and transcription termination sequence of the construct will usually comprise a 2-5kb section of the baculovirus genome. Methods for introducing heterologous DNA into the desired site in the baculovirus virus are known in the art. (See Summers and Smith supra; Ju et al. (1987); Smith et al., Mol. Cell. Biol. (1983) 3:2156; and Luckow and Summers (1989)). For example, the insertion can be into a gene such as the polyhedrin gene, by homologous double crossover recombination; insertion can also be into a restriction enzyme site engineered into the desired baculovirus gene. Miller et al., (1989), Bioessays 4:91. The DNA sequence, when cloned in place of the polyhedrin gene in the expression vector, is flanked both 5′ and 3′ by polyhedrin-specific sequences and is positioned downstream of the polyhedrin promoter.

[0132] The newly formed baculovirus expression vector is subsequently packaged into an infectious recombinant baculovirus. Homologous recombination occurs at low frequency (between ˜1% and ˜5%); thus, the majority of the virus produced after cotransfection is still wild-type virus. Therefore, a method is necessary to identify recombinant viruses. An advantage of the expression system is a visual screen allowing recombinant viruses to be distinguished. The polyhedrin protein, which is produced by the native virus, is produced at very high levels in the nuclei of infected cells at late times after viral infection. Accumulated polyhedrin protein forms occlusion bodies that also contain embedded particles. These occlusion bodies, up to 15 μm in size, are highly refractile, giving them a bright shiny appearance that is readily visualized under the light microscope. Cells infected with recombinant viruses lack occlusion bodies. To distinguish recombinant virus from wild-type virus, the transfection supernatant is plaqued onto a monolayer of insect cells by techniques known to those skilled in the art. Namely, the plaques are screened under the light microscope for the presence (indicative of wild-type virus) or absence (indicative of recombinant virus) of occlusion bodies. “Current Protocols in Microbiology” Vol. 2 (Ausubel et al. eds) at 16.8 (Supp. 10, 1990); Summers & Smith, supra; Miller et al. (1989).

[0133] Recombinant baculovirus expression vectors have been developed for infection into several insect cells. For example, recombinant baculoviruses have been developed for, inter alia: Aedes aegypti, Autographa californica, Bombyx mori, Drosophila melanogaster, Spodoptera frugiperda, and Trichoplusia ni (WO 89/046699; Carbonell et al., (1985) J. Virol. 56:153; Wright (1986) Nature 321:718; Smith et al., (1983) Mol. Cell. Biol. 3:2156; and see generally, Fraser, et al. (1989) In Vitro Cell Dev. Biol. 25:225).

[0134] Cells and cell culture media are commercially available for both direct and fusion expression of heterologous polypeptides in a baculovirus/expression system; cell culture technology is generally known to those skilled in the art. See, e.g. Summers and Smith supra.

[0135] The modified insect cells may then be grown in an appropriate nutrient medium, which allows for stable maintenance of the plasmid(s) present in the modified insect host. Where the expression product gene is under inducible control, the host may be grown to high density, and expression induced. Alternatively, where expression is constitutive, the product will be continuously expressed into the medium and the nutrient medium must be continuously circulated, while removing the product of interest and augmenting depleted nutrients. The product may be purified by such techniques as chromatography, e.g. HPLC, affinity chromatography, ion exchange chromatography, etc.; electrophoresis; density gradient centrifugation; solvent extraction, or the like. As appropriate, the product may be further purified, as required, so as to remove substantially any insect proteins which are also secreted in the medium or result from lysis of insect cells, so as to provide a product which is at least substantially free of host debris, e.g. proteins, lipids and polysaccharides.

[0136] In order to obtain protein expression, recombinant host cells derived from the transformants are incubated under conditions which allow expression of the recombinant protein encoding sequence. These conditions will vary, dependent upon the host cell selected. However, the conditions are readily ascertainable to those of ordinary skill in the art, based upon what is known in the art.

iii. Plant Systems

[0137] There are many plant cell culture and whole plant genetic expression systems known in the art. Exemplary plant cellular genetic expression systems include those described in patents, such as: U.S. Pat. Nos. 5,693,506; US 5,659,122; and US 5,608,143. Additional examples of genetic expression in plant cell culture has been described by Zenk, Phytochemistry 30:3861-3863 (1991). Descriptions of plant protein signal peptides may be found in addition to the references described above in Vaulcombe et al., Mol. Gen. Genet. 209:33-40 (1987); Chandler et al., Plant Molecular Biology 3:407-418 (1984); Rogers, J. Biol. Chem. 260:3731-3738 (1985); Rothstein et al., Gene 55:353-356 (1987); Whittier et al., Nucleic Acids Research 15:2515-2535 (1987); Wirsel et al., Molecular Microbiology 3:3-14 (1989); Yu et al., Gene 122:247-253 (1992). A description of the regulation of plant gene expression by the phytohormone, gibberellic acid and secreted enzymes induced by gibberellic acid can be found in R. L. Jones and J. MacMillin, Gibberellins: in: Advanced Plant Physiology,. Malcolm B. Wilkins, ed., 1984 Pitman Publishing Limited, London, pp. 21-52. References that describe other metabolically-regulated genes: Sheen, Plant Cell, 2:1027-1038(1990); Maas et al., EMBO J. 9:3447-3452 (1990); Benkel and Hickey, Proc. Natl. Acad. Sci. 84:1337-1339 (1987)

[0138] Typically, using techniques known in the art, a desired polynucleotide sequence is inserted into an expression cassette comprising genetic regulatory elements designed for operation in plants. The expression cassette is inserted into a desired expression vector with companion sequences upstream and downstream from the expression cassette suitable for expression in a plant host. The companion sequences will be of plasmid or viral origin and provide necessary characteristics to the vector to permit the vectors to move DNA from an original cloning host, such as bacteria, to the desired plant host. The basic bacterial/plant vector construct will preferably provide a broad host range prokaryote replication origin; a prokaryote selectable marker; and, for Agrobacterium transformations, T DNA sequences for Agrobacterium-mediated transfer to plant chromosomes. Where the heterologous gene is not readily amenable to detection, the construct will preferably also have a selectable marker gene suitable for determining if a plant cell has been transformed. A general review of suitable markers, for example for the members of the grass family, is found in Wilmink and Dons, 1993, Plant Mol. Biol. Reptr, 11(2):165-185.

[0139] Sequences suitable for permitting integration of the heterologous sequence into the plant genome are also recommended. These might include transposon sequences and the like for homologous recombination as well as Ti sequences which permit random insertion of a heterologous expression cassette into a plant genome. Suitable prokaryote selectable markers include resistance toward antibiotics such as ampicillin or tetracycline. Other DNA sequences encoding additional functions may also be present in the vector, as is known in the art.

[0140] The nucleic acid molecules of the subject invention may be included into an expression cassette for expression of the protein(s) of interest. Usually, there will be only one expression cassette, although two or more are feasible. The recombinant expression cassette will contain in addition to the heterologous protein encoding sequence the following elements, a promoter region, plant 5′ untranslated sequences, initiation codon depending upon whether or not the structural gene comes equipped with one, and a transcription and translation termination sequence. Unique restriction enzyme sites at the 5′ and 3′ ends of the cassette allow for easy insertion into a pre-existing vector.

[0141] A heterologous coding sequence may be for any protein relating to the present invention. The sequence encoding the protein of interest will encode a signal peptide which allows processing and translocation of the protein, as appropriate, and will usually lack any sequence which might result in the binding of the desired protein of the invention to a membrane. Since, for the most part, the transcriptional initiation region will be for a gene which is expressed and translocated during germination, by employing the signal peptide which provides for translocation, one may also provide for translocation of the protein of interest. In this way, the protein(s) of interest will be translocated from the cells in which they are expressed and may be efficiently harvested. Typically secretion in seeds are across the aleurone or scutellar epithelium layer into the endosperm of the seed. While it is not required that the protein be secreted from the cells in which the protein is produced, this facilitates the isolation and purification of the recombinant protein.

[0142] Since the ultimate expression of the desired gene product will be in a eucaryotic cell it is desirable to determine whether any portion of the cloned gene contains sequences which will be processed out as introns by the host's splicosome machinery. If so, site-directed mutagenesis of the “intron” region may be conducted to prevent losing a portion of the genetic message as a false intron code, Reed and Maniatis, Cell 41:95-105, 1985.

[0143] The vector can be microinjected directly into plant cells by use of micropipettes to mechanically transfer the recombinant DNA. Crossway, Mol. Gen. Genet, 202:179-185, 1985. The genetic material may also be transferred into the plant cell by using polyethylene glycol, Krens, et al., Nature, 296, 72-74, 1982. Another method of introduction of nucleic acid segments is high velocity ballistic penetration by small particles with the nucleic acid either within the matrix of small beads or particles, or on the surface, Klein, et al., Nature, 327, 70-73, 1987 and Knudsen and Muller, 1991, Planta, 185:330-336 teaching particle bombardment of barley endosperm to create transgenic barley. Yet another method of introduction would be fusion of protoplasts with other entities, either minicells, cells, lysosomes or other fusible lipid-surfaced bodies, Fraley, et al., Proc. Natl. Acad. Sci. USA, 79, 1859-1863, 1982.

[0144] The vector may also be introduced into the plant cells by electroporation. (Fromm et al., Proc. Natl. Acad. Sci. USA 82:5824, 1985). In this technique, plant protoplasts are electroporated in the presence of plasmids containing the gene construct Electrical impulses of high field strength reversibly permeabilize biomembranes allowing the introduction of the plasmids. Electroporated plant protoplasts reform the cell wall, divide, and form plant callus.

[0145] All plants from which protoplasts can be isolated and cultured to give whole regenerated plants can be transformed by the present invention so that whole plants are recovered which contain the transferred gene. It is known that practically all plants can be regenerated from cultured cells or tissues, including but not limited to all major species of sugarcane, sugar beet, cotton, fruit and other trees, legumes and vegetables. Some suitable plants include, for example, species from the genera Fragaria, Lotus, Medicago, Onobrychis, Trifolium, Trigonella, Vigna, Citrus, Linum, Geranium, Manihot, Daucus, Arabidopsis, Brassica, Raphanus, Sinapis, Atropa, Capsicum, Datura, Hyoscyamus, Lycopersion, Nicotiana, Solanum, Petunia, Digitalis, Majorana, Cichorium, Helianthus, Lactuca, Bromus, Asparagus, Antirrhinum, Hererocallis, Nemesia, Pelargonium, Panicum, Pennisetum, Ranunculus, Senecio, Salpiglossis, Cucumis, Browaalia, Glycine, Lolium, Zea, Triticum, Sorghum, and Datura.

[0146] Means for regeneration vary from species to species of plants, but generally a suspension of transformed protoplasts containing copies of the heterologous gene is first provided. Callus tissue is formed and shoots may be induced from callus and subsequently rooted. Alternatively, embryo formation can be induced from the protoplast suspension. These embryos germinate as natural embryos to form plants. The culture media will generally contain various amino acids and hormones, such as auxin and cytokinins. It is also advantageous to add glutamic acid and proline to the medium, especially for such species as corn and alfalfa. Shoots and roots normally develop simultaneously. Efficient regeneration will depend on the medium, on the genotype, and on the history of the culture. If these three variables are controlled, then regeneration is fully reproducible and repeatable.

[0147] In some plant cell culture systems, the desired protein of the invention may be excreted or alternatively, the protein may be extracted from the whole plant. Where the desired protein of the invention is secreted into the medium, it may be collected. Alternatively, the embryos and embryoless-half seeds or other plant tissue may be mechanically disrupted to release any secreted protein between cells and tissues. The mixture may be suspended in a buffer solution to retrieve soluble proteins. Conventional protein isolation and purification methods will be then used to purify the recombinant protein. Parameters of time, temperature pH, oxygen, and volumes will be adjusted through routine methods to optimize expression and recovery of heterologous protein.

iv. Bacterial Systems

[0148] Bacterial expression techniques are known in the art. A bacterial promoter is any DNA sequence capable of binding bacterial RNA polymerase and initiating the downstream (3′) transcription of a coding sequence (e.g. structural gene) into mRNA. A promoter will have a transcription initiation region which is usually placed proximal to the 5′ end of the coding sequence. This transcription initiation region usually includes an RNA polymerase binding site and a transcription initiation site. A bacterial promoter may also have a second domain called an operator, that may overlap an adjacent RNA polymerase binding site at which RNA synthesis begins. The operator permits negative regulated (inducible) transcription, as a gene repressor protein may bind the operator and thereby inhibit transcription of a specific gene. Constitutive expression may occur in the absence of negative regulatory elements, such as the operator. In addition, positive regulation may be achieved by a gene activator protein binding sequence, which, if present is usually proximal (5′) to the RNA polymerase binding sequence. An example of a gene activator protein is the catabolite activator protein (CAP), which helps initiate transcription of the lac operon in Escherichia coli (E. coli) [Raibaud et al. (1984) Annu. Rev. Genet. 18:173]. Regulated expression may therefore be either positive or negative, thereby either enhancing or reducing transcription.

[0149] Sequences encoding metabolic pathway enzymes provide particularly useful promoter sequences. Examples include promoter sequences derived from sugar metabolizing enzymes, such as galactose, lactose (lac) [Chang et al. (1977) Nature 198:1056], and maltose. Additional examples include promoter sequences derived from biosynthetic enzymes such as tryptophan (trp) [Goeddel et al. (1980) Nuc. Acids Res. 8:4057; Yelverton et al. (1981) Nucl. Acids Res. 9:731; U.S. Pat. No. 4,738,921; EP-A-0036776 and EP-A-0121775]. The g-laotamase (bla) promoter system [Weissmann (1981) “The cloning of interferon and other mistakes.” In Interferon 3 (ed. I. Gresser)], bacteriophage lambda PL [Shimatake et al. (1981) Nature 292:128] and T5 [U.S. Pat. No. 4,689,406] promoter systems also provide useful promoter sequences.

[0150] In addition, synthetic promoters which do not occur in nature also function as bacterial promoters. For example, transcription activation sequences of one bacterial or bacteriophage promoter may be joined with the operon sequences of another bacterial or bacteriophage promoter, creating a synthetic hybrid promoter [U.S. Pat. No. 4,551,433]. For example, the tac promoter is a hybrid trp-lac promoter comprised of both trp promoter and lac operon sequences that is regulated by the lac repressor [Amann et al. (1983) Gene 25:167; de Boer et al. (1983) Proc. Natl. Acad. Sci. 80:21]. Furthermore, a bacterial promoter can include naturally occurring promoters of non-bacterial origin that have the ability to bind bacterial RNA polymerase and initiate transcription. A naturally occurring promoter of non-bacterial origin can also be coupled with a compatible RNA polymerase to produce high levels of expression of some genes in prokaryotes. The bacteriophage T7 RNA polymerase/promoter system is an example of a coupled promoter system [Studier et al. (1986) J. Mol. Biol. 189:113; Tabor et al. (1985) Proc Natl. Acad. Sci. 82:1074]. In addition, a hybrid promoter can also be comprised of a bacteriophage promoter and an E. coli operator region (EPO-A-0 267 851).

[0151] In addition to a functioning promoter sequence, an efficient ribosome binding site is also useful for the expression of foreign genes in prokaryotes. In E. coli, the ribosome binding site is called the Shine-Dalgarno (SD) sequence and includes an initiation codon (ATG) and a sequence 3-9 nucleotides in length located 3-11 nucleotides upstream of the initiation codon [Shine et al. (1975) Nature 254:34]. The SD sequence is thought to promote binding of mRNA to the ribosome by the pairing of bases between the SD sequence and the 3′ and of E. coli 16S rRNA [Steitz et al. (1979) “Genetic signals and nucleotide sequences in messenger RNA.” In Biological Regulation and Development: Gene Expression (ed. R. F. Goldberger)]. To express eukaryotic genes and prokaryotic genes with weak ribosome-binding site [Sambrook et al. (1989) “Expression of cloned genes in Escherichia coli. ” In Molecular Cloning: A Laboratory Manual].

[0152] A DNA molecule may be expressed intracellularly. A promoter sequence may be directly linked with the DNA molecule, in which case the first amino acid at the N-terminus will always be a methionine, which is encoded by the ATG start codon. If desired, methionine at the N-terminus may be cleaved from the protein by in vitro incubation with cyanogen bromide or by either in vivo on in vitro incubation with a bacterial methionine N-terminal peptidase (EPO-A-0 219 237).

[0153] Fusion proteins provide an alternative to direct expression. Usually, a DNA sequence encoding the N-terminal portion of an endogenous bacterial protein, or other stable protein, is fused to the 5′ end of heterologous coding sequences. Upon expression, this construct will provide a fusion of the two amino acid sequences. For example, the bacteriophage lambda cell gene can be linked at the 5′ terminus of a foreign gene and expressed in bacteria. The resulting fusion protein preferably retains a site for a processing enzyme (factor Xa) to cleave the bacteriophage protein from the foreign gene [Nagai et al. (1984) Nature 309:810]. Fusion proteins can also be made with sequences from the lacZ [Jia et al. (1987) Gene 60:197], trpE [Allen et al. (1987) J. Biotechnol. 5:93; Makoff et al. (1989) J. Gen. Microbiol. 135:11], and Chey [EP-A-0 324 647] genes. The DNA sequence at the junction of the two amino acid sequences may or may not encode a cleavable site. Another example is a ubiquitin fusion protein. Such a fusion protein is made with the ubiquitin region that preferably retains a site for a processing enzyme (e.g. ubiquitin specific processing-protease) to cleave the ubiquitin from the foreign protein. Through this method, native foreign protein can be isolated [Miller et al. (1989) Bio/Technology 7:698].

[0154] Alternatively, foreign proteins can also be secreted from the cell by creating chimeric DNA molecules that encode a fusion protein comprised of a signal peptide sequence fragment that provides for secretion of the foreign protein in bacteria [U.S. Pat. No. 4,336,336]. The signal sequence fragment usually encodes a signal peptide comprised of hydrophobic amino acids which direct the secretion of the protein from the cell. The protein is either secreted into the growth media (gram-positive bacteria) or into the periplasmic space, located between the inner and outer membrane of the cell (gram-negative bacteria). Preferably there are processing sites, which can be cleaved either in vivo or in vitro encoded between the signal peptide fragment and the foreign gene.

[0155] DNA encoding suitable signal sequences can be derived from genes for secreted bacterial proteins, such as the E. coli outer membrane protein gene (ompA) [Masui et al. (1983), in: Experimental Manipulation of Gene Expression; Ghrayeb et al. (1984) EMBO J. 3:2437] and the E. coli alkaline phosphatase signal sequence (phoA) [Oka et al. (1985) Proc. Natl. Acad. Sci. 82:7212]. As an additional example, the signal sequence of the alpha-amylase gene from various Bacillus strains can be used to secrete heterologous proteins from B. subtilis [Palva et al. (1982) Proc. Natl. Acad. Sci. USA 79:5582; EP-A-0 244 042].

[0156] Usually, transcription termination sequences recognized by bacteria are regulatory regions located 3′ to the translation stop codon, and thus together with the promoter flank the coding sequence. These sequences direct the transcription of an mRNA which can be translated into the polypeptide encoded by the DNA. Transcription termination sequences frequently include DNA sequences of about 50 nucleotides capable of forming stem loop structures that aid in terminating transcription. Examples include transcription termination sequences derived from genes with strong promoters, such as the trp gene in E. coli as well as other biosynthetic genes.

[0157] Usually, the above described components, comprising a promoter, signal sequence (if desired), coding sequence of interest, and transcription termination sequence, are put together into expression constructs. Expression constructs are often maintained in a replicon, such as an extrachromosomal element (e.g. plasmids) capable of stable maintenance in a host, such as bacteria. The replicon will have a replication system, thus allowing it to be maintained in a prokaryotic host either for expression or for cloning and amplification. In addition, a replicon may be either a high or low copy number plasmid. A high copy number plasmid will generally have a copy number ranging from about 5 to about 200, and usually about 10 to about 150. A host containing a high copy number plasmid will preferably contain at least about 10, and more preferably at least about 20 plasmids. Either a high or low copy number vector may be selected, depending upon the effect of the vector and the foreign protein on the host.

[0158] Alternatively, the expression constructs can be integrated into the bacterial genome with an integrating vector. Integrating vectors usually contain at least one sequence homologous to the bacterial chromosome that allows the vector to integrate. Integrations appear to result from recombinations between homologous DNA in the vector and the bacterial chromosome. For example, integrating vectors constructed with DNA from various Bacillus strains integrate into the Bacillus chromosome (EP-A- 0 127 328). Integrating vectors may also be comprised of bacteriophage or transposon sequences.

[0159] Usually, extrachromosomal and integrating expression constructs may contain selectable markers to allow for the selection of bacterial strains that have been transformed. Selectable markers can be expressed in the bacterial host and may include genes which render bacteria resistant to drugs such as ampicillin, chloramphenicol, erythromycin, kanamycin (neomycin), and tetracycline [Davies et al. (1978) Annu. Rev. Microbiol. 32:469]. Selectable markers may also include biosynthetic genes, such as those in the histidine, tryptophan, and leucine biosynthetic pathways.

[0160] Alternatively, some of the above described components can be put together in transformation vectors. Transformation vectors are usually comprised of a selectable market that is either maintained in a replicon or developed into an integrating vector, as described above.

[0161] Expression and transformation vectors, either extra-chromosomal replicons or integrating vectors, have been developed for transformation into many bacteria. For example, expression vectors have been developed for, inter alia, the following bacteria: Bacillus subtilis [Palva et al. (1982) Proc. Natl. Acad. Sci. USA 79:5582; EP-A-0 036 259 and EP-A-0 063 953; WO 84/04541], Escherichia coli [Shimatake et al. (1981) Nature 292:128; Amann et al. (1985) Gene 40:183; Studier et al. (1986) J. Mol. Biol. 189:113; EP-A-0 036 776, EP-A-0 136 829 and EP-A-0 136 907], Streptococcus cremoris [Powell et al. (1988) Appl. Environ. Microbiol. 54:655]; Streptococcus lividans [Powell et al. (1988) Appl. Environ. Microbiol. 54:655], Streptomyces lividans [U.S. Pat. No. 4,745,056].

[0162] Methods of introducing exogenous DNA into bacterial hosts are well-known in the art, and usually include either the transformation of bacteria treated with CaCl₂ or other agents, such as divalent cations and DMSO. DNA can also be introduced into bacterial cells by electroporation. Transformation procedures usually vary with the bacterial species to be transformed. See e. g. [Masson et al. (1989) FEMS Microbiol. Lett. 60:273; Palva et al. (1982) Proc. Natl. Acad. Sci. USA 79:5582; EP-A-0 036 259 and EP-A-0 063 953; WO 84/04541, Bacillus], [Miller et al. (1988) Proc. Natl. Acad. Sci. 85:856; Wang et al. (1990) J. Bacteriol. 172:949, Campylobacter], [Cohen et al. (1973) Proc. Natl. Acad. Sci. 69:2110; Dower et al. (1988) Nucleic Acids Res. 16:6127; Kushner (1978) “An improved method for transformation of Escherichia coli with ColE1-derived plasmids. In Genetic Engineering: Proceedings of the International Symposium on Genetic Engineering (eds. H. W. Boyer and S. Nicosia); Mandel et al. (1970) J. Mol. Biol. 53:159; Taketo (1988) Biochim. Biophys. Acta 949:318; Escherichia], [Chassy et al. (1987) FEMS Microbiol. Lett. 44:173 Lactobacillus]; [Fiedler et al. (1988) Anal. Biochem 170:38, Pseudomonas]; [Augustin et al. (1990) FEMS Microbiol. Lett. 66:203, Staphylococcus], [Barany et al. (1980) J Bacteriol. 144:698; Harlander (1987) “Transformation of Streptococcus lactis by electroporation, in: Streptococcal Genetics (ed. J. Ferretti and R. Curtiss III); Perry et al. (1981) Infect. Immun. 32:1295; Powell et al (1988) Appl. Environ. Microbiol. 54:655; Somkuti et al. (1987) Proc. 4th Evr. Cong. Biotechnology 1:412, Streptococcus].

v. Yeast Expression

[0163] Yeast expression systems are also known to one of ordinary skill in the art. A yeast promoter is any DNA sequence capable of binding yeast RNA polymerase and initiating the downstream (3′) transcription of a coding sequence (e.g. structural gene) into mRNA. A promoter will have a transcription initiation region which is usually placed proximal to the 5′ end of the coding sequence. This transcription initiation region usually includes an RNA polymerase binding site (the “TATA Box”) and a transcription initiation site. A yeast promoter may also have a second domain called an upstream activator sequence (UAS), which, if present, is usually distal to the structural gene. The UAS permits regulated (inducible) expression. Constitutive expression occurs in the absence of a UAS. Regulated expression may be either positive or negative, thereby either enhancing or reducing transcription.

[0164] Yeast is a fermenting organism with an active metabolic pathway, therefore sequences encoding enzymes in the metabolic pathway provide particularly useful promoter sequences. Examples include alcohol dehydrogenase (ADH) (EP-A-0 284 044), enolase, glucokinase, glucose-6-phosphate isomerase, glyceraldehyde-3-phosphate-dehydrogenase (GAP or GAPDH), hexokinase, phosphofructokinase, 3-phosphoglycerate mutase, and pyruvate kinase (PyK) (EPO-A-0 329 203). The yeast PHO5 gene, encoding acid phosphatase, also provides useful promoter sequences [Myanohara et al. (1983) Proc. Natl. Acad. Sci. USA 80:1].

[0165] In addition, synthetic promoters which do not occur in nature also function as yeast promoters. For example, UAS sequences of one yeast promoter may be joined with the transcription activation region of another yeast promoter, creating a synthetic hybrid promoter. Examples of such hybrid promoters include the ADH regulatory sequence linked to the GAP transcription activation region (US Patent Nos. 4,876,197 and 4,880,734). Other examples of hybrid promoters include promoters which consist of the regulatory sequences of either the ADH2, GAL4, GAL10, OR PHO5 genes, combined with the transcriptional activation region of a glycolytic enzyme gene such as GAP or PyK (EP-A-0 164 556). Furthermore, a yeast promoter can include naturally occurring promoters of non-yeast origin that have the ability to bind yeast RNA polymerase and initiate transcription. Examples of such promoters include, inter alia, (Cohen et al. (1980) Proc. Natl. Acad Sci. USA 77:1078; Henikoff et al. (1981) Nature 283:835; Hollenberg et al. (1981) Curr. Topics Microbiol. Immunol. 96:119; Hollenberg et al. (1979) “The Expression of Bacterial Antibiotic Resistance Genes in the Yeast Saccharomyces cerevisiae,” in: Plasmids of Medical, Environmental and Commercial Importance (eds. K. N. Timmis and A. Puhler); Mercerau-Puigalon et al. (1980) Gene 11:163; Panthier et al. (1980) Curr. Genet. 2:109;].

[0166] A DNA molecule may be expressed intracellularly in yeast A promoter sequence may be directly linked with the DNA molecule, in which case the first amino acid at the N-terminus of the recombinant protein will always be a methionine, which is encoded by the ATG start codon. If desired, methionine at the N-terminus may be cleaved from the protein by in vitro incubation with cyanogen bromide.

[0167] Fusion proteins provide an alternative for yeast expression systems, as well as in mammalian, baculovirus, and bacterial expression systems. Usually, a DNA sequence encoding the N-terminal portion of an endogenous yeast protein, or other stable protein, is fused to the 5′ end of heterologous coding sequences. Upon expression, this construct will provide a fusion of the two amino acid sequences. For example, the yeast or human superoxide dismutase (SOD) gene, can be linked at the 5′ terminus of a foreign gene and expressed in yeast. The DNA sequence at the junction of the two amino acid sequences may or may not encode a cleavable site. See e.g. EP-A-0 196 056. Another example is a ubiquitin fusion protein. Such a fusion protein is made with the ubiquitin region that preferably retains a site for a processing enzyme (e.g. ubiquitin-specific processing protease) to cleave the ubiquitin from the foreign protein. Through this method, therefore, native foreign protein can be isolated (e.g. W088/024066).

[0168] Alternatively, foreign proteins can also be secreted from the cell into the growth media by creating chimeric DNA molecules that encode a fusion protein comprised of a leader sequence fragment that provide for secretion in yeast of the foreign protein. Preferably, there are processing sites encoded between the leader fragment and the foreign gene that can be cleaved either in vivo or in vitro. The leader sequence fragment usually encodes a signal peptide comprised of hydrophobic amino acids which direct the secretion of the protein from the cell.

[0169] DNA encoding suitable signal sequences can be derived from genes for secreted yeast proteins, such as the genes for invertase (EP-A-0012873; JPO 62,096,086) and A-factor (U.S. Pat. No. 4,588,684). Alternatively, leaders of non-yeast origin exit, such as an interferon leader, that also provide for secretion in yeast (EP-A-0060057).

[0170] A preferred class of secretion leaders are those that employ a fragment of the yeast alpha-factor gene, which contains both a “pre” signal sequence, and a “pro” region. The types of alpha-factor fragments that can be employed include the full-length pre-pro alpha factor leader (about 83 amino acid residues) as well as truncated alpha-factor leaders (usually about 25 to about 50 amino acid residues) (U.S. Pat. Nos. 4,546,083 and 4,870,008; EP-A-0 324 274). Additional leaders employing an alpha-factor leader fragment that provides for secretion include hybrid alpha-factor leaders made with a presequence of a first yeast, but a pro-region from a second yeast alphafactor. (e.g. see WO 89/02463.)

[0171] Usually, transcription termination sequences recognized by yeast are regulatory regions located 3′ to the translation stop codon, and thus together with the promoter flank the coding sequence. These sequences direct the transcription of an mRNA which can be translated into the polypeptide encoded by the DNA. Examples of transcription terminator sequence and other yeast-recognized termination sequences, such as those coding for glycolytic enzymes.

[0172] Usually, the above described components, comprising a promoter, leader (if desired), coding sequence of interest, and transcription termination sequence, are put together into expression constructs. Expression constructs are often maintained in a replicon, such as an extrachromosomal element (e.g. plasmids) capable of stable maintenance in a host, such as yeast or bacteria. The replicon may have two replication systems, thus allowing it to be maintained, for example, in yeast for expression and in a prokaryotic host for cloning and amplification. Examples of such yeast-bacteria shuttle vectors include YEp24 [Botstein et al. (1979) Gene 8:17-24], pCl/1 [Brake et al. (1984) Proc. Natl. Acad Sci USA 81:4642-4646], and YRp17 [Stinchcomb et al. (1982) J. Mol. Biol. 158:157]. In addition, a replicon may be either a high or low copy number plasmid. A high copy number plasmid will generally have a copy number ranging from about 5 to about 200, and usually about 10 to about 150. A host containing a high copy number plasmid will preferably have at least about 10, and more preferably at least about 20. Enter a high or low copy number vector may be selected, depending upon the effect of the vector and the foreign protein on the host. See e.g. Brake et al., supra.

[0173] Alternatively, the expression constructs can be integrated into the yeast genome with an integrating vector. Integrating vectors usually contain at least one sequence homologous to a yeast chromosome that allows the vector to integrate, and preferably contain two homologous sequences flanking the expression construct. Integrations appear to result from recombinations between homologous DNA in the vector and the yeast chromosome [Orr-Weaver et al. (1983) Methods in Enzymol. 101:228-245]. An integrating vector may be directed to a specific locus in yeast by selecting the appropriate homologous sequence for inclusion in the vector. See Orr-Weaver et al., supra. One or more expression construct may integrate, possibly affecting levels of recombinant protein produced [Rine et al. (1983) Proc. Natl. Acad. Sci. USA 80:6750]. The chromosomal sequences included in the vector can occur either as a single segment in the vector, which results in the integration of the entire vector, or two segments homologous to adjacent segments in the chromosome and flanking the expression construct in the vector, which can result in the stable integration of only the expression construct.

[0174] Usually, extrachromosomal and integrating expression constructs may contain selectable markers to allow for the selection of yeast strains that have been transformed. Selectable markers may include biosynthetic genes that can be expressed in the yeast host, such as ADE2, HIS4, LEU2, TRP1, and ALG7, and the G418 resistance gene, which confer resistance in yeast cells to tunicamycin and G418, respectively. In addition, a suitable selectable marker may also provide yeast with the ability to grow in the presence of toxic compounds, such as metal. For example, the presence of CUP1 allows yeast to grow in the presence of copper ions [Butt et al. (1987) Microbiol Rev. 51:351].

[0175] Alternatively, some of the above described components can be put together into transformation vectors. Transformation vectors are usually comprised of a selectable marker that is either maintained in a replicon or developed into an integrating vector, as described above.

[0176] Expression and transformation vectors, either extrachromosomal replicons or integrating vectors, have been developed for transformation into many yeasts. For example, expression vectors have been developed for, inter alia, the following yeasts: Candida albicans [Kurtz, et al. (1986) Mol. Cell. Biol. 6:142], Candida maltosa [Kunze, et al. (1985) J. Basic Microbiol. 25:141]. Hansenula polymorpha [Gleeson, et al. (1986) J. Gen. Microbiol. 132:3459; Roggenkamp et al. (1986) Mol. Gen. Genet. 202:302], Kluyveromyces fragilis [Das, et al. (1984) J. Bacteriol. 158:1165], Kluyveromyces lactis [De Louvencourt et al. (1983) J. Bacteriol. 154:737; Van den Berg et al. (1990) Bio/Technology 8:135], Pichia guillerimondii [Kunze et al. (1985) i J. Basic Microbiol. 25:141], Pichia pastoris [Cregg, et al. (1985) Mol. Cell. Biol. 5:3376; U.S. Pat. Nos. 4,837,148 and 4,929,555], Saccharomyces cerevisiae [Hinnen et al. (1978) Proc. Natl. Acad. Sci. USA 75:1929; Ito et al. (1983) J. Bacteriol. 153:163], Schizosaccharomyces pombe [Beach and Nurse (1981) Nature 300:706], and Yarrowia lipolytica [Davidow, et al. (1985) Curr. Genet. 10:380471 Gaillardin, et al. (1985) Cw7r. Genet. 10:49].

[0177] Methods of introducing exogenous DNA into yeast hosts are well-known in the art, and usually include either the transformation of spheroplasts or of intact yeast cells treated with alkali cations. Transformation procedures usually vary with the yeast species to be transformed. See e.g. [Kurtz et al. (1986) Mol. Cell. Biol. 6:142; Kunze et al. (1985) J. Basic Microbiol. 25:141; Candida]; [Gleeson et al. (1986) J. Gen. Microbiol. 132:3459; Roggenkamp et al. (1986) Mol. Gen. Genet. 202:302; Hansenula]; [Das et al. (1984) J. Bacteriol. 158:1165; De Louvencourt et al. (1983) J. Bacteriol. 154:1165; Van den Berg et al. (1990) Bio/Technology 8:135; Kluyveromyces]; [Cregg et al. (1985) Mol. Cell. Biol. 5:3376; Kunze et al. (1985) J. Basic Microbiol. 25:141; U.S. Pat. Nos. 4,837,148 & 4,929,555; Pichia]; [Hinnen et al. (1978) Proc. Natl. Acad. Sci. USA 75;1929; Ito et al. (1983) J. Bacteriol. 153:163 Saccharomyces]; [Beach & Nurse (1981) Nature 300:706; Schizosaccharomyces]; [Davidow et al. (1985) Curr. Genet. 10:39; Gaillardin et al. (1985) Curr. Genet. 10:49; Yarrowia].

Pharmaceutical Compositions

[0178] Pharmaceutical compositions can comprise polypeptides and/or nucleic acid of the invention. The pharmaceutical compositions will comprise a therapeutically effective amount of either polypeptides, antibodies, or polynucleotides of the claimed invention. The term “therapeutically effective amount” as used herein refers to an amount of a therapeutic agent to treat, ameliorate, or prevent a desired disease or condition, or to exhibit a detectable therapeutic or preventative effect.

[0179] The effect can be detected by, for example, chemical markers or antigen levels. Therapeutic effects also include reduction in physical symptoms, such as decreased body temperature. The precise effective amount for a subject will depend upon the subject's size and health, the nature and extent of the condition, and the therapeutics or combination of therapeutics selected for administration. Thus, it is not useful to specify an exact effective amount in advance. However, the effective amount for a given situation can be determined by routine experimentation and is within the judgement of the clinician.

[0180] For purposes of the present invention, an effective dose will be from about 0.01 mg/ kg to 50 mg/kg or 0.05 mg/kg to about 10 mg/kg of the DNA constructs in the individual to which it is administered.

[0181] A pharmaceutical composition can also contain a pharmaceutically acceptable carrier. The term “pharmaceutically acceptable carrier” refers to a carrier for administration of a therapeutic agent, such as antibodies or a polypeptide, genes, and other therapeutic agents. The term refers to any pharmaceutical carrier that does not itself induce the production of antibodies harmful to the individual receiving the composition, and which may be administered without undue toxicity. Suitable carriers may be large, slowly metabolized macromolecules such as proteins, polysaccharides, polylactic acids, polyglycolic acids, polymeric amino acids, amino acid copolymers, and inactive virus particles. Such carriers are well known to those of ordinary skill in the art.

[0182] Pharmaceutically acceptable salts can be used therein, for example, mineral acid salts such as hydrochlorides, hydrobromides, phosphates, sulfates, and the like; and the salts of organic acids such as acetates, propionates, malonates, benzoates, and the like. A thorough discussion of pharmaceutically acceptable excipients is available in Remington's Pharmaceutical Sciences (Mack Pub. Co., N.J. 1991).

[0183] Pharmaceutically acceptable carriers in therapeutic compositions may contain liquids such as water, saline, glycerol and ethanol. Additionally, auxiliary substances, such as wetting or emulsifying agents, pH buffering substances, and the like, may be present in such vehicles. Typically, the therapeutic compositions are prepared as injectables, either as liquid solutions or suspensions; solid forms suitable for solution in, or suspension in, liquid vehicles prior to injection may also be prepared. Liposomes are included within the definition of a pharmaceutically acceptable carrier.

Delivery Methods

[0184] Once formulated, the compositions of the invention can be administered directly to the subject. The subjects to be treated can be animals; in particular, human subjects can be treated.

[0185] Direct delivery of the compositions will generally be accomplished by injection, either subcutaneously, intraperitoneally, intravenously or intramuscularly or delivered to the interstitial space of a tissue. The compositions can also be administered into a lesion. Other modes of administration include oral and pulmonary administration, suppositories, and transdermal or transcutaneous applications (e.g. see WO98/20734), needles, and gene guns or hyposprays. Dosage treatment may be a single dose schedule or a multiple dose schedule.

Vaccines

[0186] Vaccines according to the invention may either be prophylactic (ie. to prevent infection) or therapeutic (ie. to treat disease after infection).

[0187] Such vaccines comprise immunising antigen(s), immunogen(s), polypeptide(s), protein(s) or nucleic acid, usually in combination with “pharmaceutically acceptable carriers,” which include any carrier that does not itself induce the production of antibodies harmful to the individual receiving the composition. Suitable carriers are typically large, slowly metabolized macromolecules such as proteins, polysaccharides, polylactic acids, polyglycolic acids, polymeric amino acids, amino acid copolymers, lipid aggregates (such as oil droplets or liposomes), and inactive virus particles. Such carriers are well known to those of ordinary skill in the art. Additionally, these carriers may function as immunostimulating agents (“adjuvants”). Furthermore, the antigen or immunogen may be conjugated to a bacterial toxoid, such as a toxoid from diphtheria, tetanus, cholera, H. pylori, etc. pathogens.

[0188] Preferred adjuvants to enhance effectiveness of the composition include, but are not limited to: (1) aluminum salts (alum), such as aluminum hydroxide, aluminum phosphate, aluminum sulfate, etc; (2) oil-in-water emulsion formulations (with or without other specific immunostimulating agents such as muramyl peptides (see below) or bacterial cell wall components), such as for example (a) MF59™ (WO 90/14837; Chapter 10 in Vaccine design: the subunit and adjuvant approach, eds. Powell & Newman, Plenum Press 1995), containing 5% Squalene, 0.5% Tween 80, and 0.5% Span 85 (optionally containing various amounts of MTP-PE (see below), although not required) formulated into submicron particles using a microfluidizer such as Model 110Y microfluidizer (Microfluidics, Newton, Mass.), (b) SAF, containing 10% Squalane, 0.4% Tween 80, 5% pluronic-blocked polymer L 121, and thr-MDP (see below) either microfluidized into a submicron emulsion or vortexed to generate a larger particle size emulsion, and (c) Ribi™ adjuvant system (RAS), (Ribi Immunochem, Hamilton, Mont.) containing 2% Squalene, 0.2% Tween 80, and one or more bacterial cell wall components from the group consisting of monophosphorylipid A (MPL), trehalose dimycolate (TDM), and cell wall skeleton (CWS), preferably MPL+CWS (Detox™); (3) saponin adjuvants, such as Stimulon™ (Cambridge Bioscience, Worcester, Mass.) may be used or particles generated therefrom such as ISCOMs (immunostimulating complexes); (4) Complete Freund's Adjuvant (CFA) and Incomplete Freund's Adjuvant (IFA); (5) cytokines, such as interleukins (e.g. IL-1, IL-2, IL-4, IL-5, IL-6, IL-7, IL-12, etc.), interferons (e.g. gamma interferon), macrophage colony stimulating factor (M-CSF), tumor necrosis factor (TNF), etc; and (6) other substances that act as immunostimulating agents to enhance the effectiveness of the composition. Alum and MF59™ are preferred.

[0189] As mentioned above, muramyl peptides include, but are not limited to, N-acetyl-muramyl-L-threonyl-D-isoglutamine (thr-MDP), N-acetyl-normuramyl-L-alanyl-D-isoglutamine (nor-MDP), N-acetylmuramyl-L-alanyl-D-isoglutaminyl-L-alanine-2-(1′-2′-dipalmitoyl-sn-glycero-3-hydroxyphosphoryloxy)-ethylamine (MTP-PE), etc.

[0190] The immunogenic compositions (e.g. the immunising antigen/immunogen/polypeptide/protein/nucleic acid, pharmaceutically acceptable carrier, and adjuvant) typically will contain diluents, such as water, saline, glycerol, ethanol, etc. Additionally, auxiliary substances, such as wetting or emulsifying agents, pH buffering substances, and the like, may be present in such vehicles.

[0191] Typically, the immunogenic compositions are prepared as injectables, either as liquid solutions or suspensions; solid forms suitable for solution in, or suspension in, liquid vehicles prior to injection may also be prepared. The preparation also may be emulsified or encapsulated in liposomes for enhanced adjuvant effect, as discussed above under pharmaceutically acceptable carriers.

[0192] Immunogenic compositions used as vaccines comprise an immunologically effective amount of the antigenic or immunogenic polypeptides, as well as any other of the above-mentioned components, as needed. By “immunologically effective amount”, it is meant that the administration of that amount to an individual, either in a single dose or as part of a series, is effective for treatment or prevention. This amount varies depending upon the health and physical condition of the individual to be treated, the taxonomic group of individual to be treated (e.g. nonhuman primate, primate, etc.), the capacity of the individual's immune system to synthesize antibodies, the degree of protection desired, the formulation of the vaccine, the treating doctor's assessment of the medical situation, and other relevant factors. It is expected that the amount will fall in a relatively broad range that can be determined through routine trials.

[0193] The immunogenic compositions are conventionally administered parenterally, e.g. by injection, either subcutaneously, intramuscularly, or transdermally/transcutaneously (e.g. W098/20734). Additional formulations suitable for other modes of administration include oral and pulmonary formulations, suppositories, and transdermal applications. Dosage treatment may be a single dose schedule or a multiple dose schedule. The vaccine may be administered in conjunction with other immunoregulatory agents.

[0194] As an alternative to protein-based vaccines, DNA vaccination may be employed [e.g. Robinson & Torres (1997) Seminars in Immunology 9:271-283; Donnelly et al. (1997) Annu Rev Immunol 15:617-648; see later herein].

Gene Delivery Vehicles

[0195] Gene therapy vehicles for delivery of constructs including a coding sequence of a therapeutic of the invention, to be delivered to the mammal for expression in the mammal, can be administered either locally or systemically. These constructs can utilize viral or non-viral vector approaches in in vivo or ex vivo modality. Expression of such coding sequence can be induced using endogenous mammalian or heterologous promoters. Expression of the coding sequence in vivo can be either constitutive or regulated.

[0196] The invention includes gene delivery vehicles capable of expressing the contemplated nucleic acid sequences. The gene delivery vehicle is preferably a viral vector and, more preferably, a retroviral, adenoviral, adeno-associated viral (AAV), herpes viral, or alphavirus vector. The viral vector can also be an astrovirus, coronavirus, orthomyxovirus, papovavirus, paramyxovirus, parvovirus, picornavirus, poxvirus, or togavirus viral vector. See generally, Jolly (1994) Cancer Gene Therapy 1:51-64; Kimura (1994) Human Gene Therapy 5:845-852; Connelly (1995) Human Gene Therapy 6:185-193; and Kaplitt (1994) Nature Genetics 6:148-153.

[0197] These recombinant retroviral vectors may be used to generate transduction competent retroviral vector particles by introducing them into appropriate packaging cell lines (see U.S. Pat. No. 5,591,624). Retrovirus vectors can be constructed for site-specific integration into host cell DNA by incorporation of a chimeric integrase enzyme into the retroviral particle (see WO96/37626). It is preferable that the recombinant viral vector is a replication defective recombinant virus.

[0198] Packaging cell lines suitable for use with the above-described retrovirus vectors are well known in the art, are readily prepared (see WO95/30763 and WO92/05266), and can be used to create producer cell lines (also termed vector cell lines or “VCLs”) for the production of recombinant vector particles. Preferably, the packaging cell lines are made from human parent cells (e.g. HT1080 cells) or mink parent cell lines, which eliminates inactivation in human serum.

[0199] Preferred retroviruses for the construction of retroviral gene therapy vectors include Avian Leukosis Virus, Bovine Leukemia, Virus, Murine Leukemia Virus, Mink-Cell Focus-Inducing Virus, Murine Sarcoma Virus, Reticuloendotheliosis Virus and Rous Sarcoma Virus. Particularly preferred Murine Leukemia Viruses include 4070A and 1504A (Hartley and Rowe (1976) J. Virol 19:19-25), Abelson (ATCC No. VR-999), Friend (ATCC No. VR-245), Graffi, Gross (ATCC Nol VR-590), Kirsten, Harvey Sarcoma Virus and Rauscher (ATCC No. VR-998) and Moloney Murine Leukemia Virus (ATCC No. VR-190). Such retroviruses may be obtained from depositories or collections such as the American Type Culture Collection (“ATCC”) in Rockville, Md. or isolated from known sources using commonly available techniques.

[0200] The gene therapy vectors of the invention also include herpes vectors. Leading and preferred examples are herpes simplex virus vectors containing a sequence encoding a thymidine kinase polypeptide such as those disclosed in U.S. Pat. No. 5,288,641 and EP0176170 (Roizman). Additional exemplary herpes simplex virus vectors include HFEM/ICP6-LacZ disclosed in WO95/04139 (Wistar), pHSVlac described in Geller (1988) Science 241:1667-1669 and in WO90/09441 & WO92/07945, HSV Us3::pgC-lacZ described in Fink (1992) Human Gene Therapy 3:11-19 and HSV 7134, 2 RH 105 and GAL4 described in EP 0453242 (Breakefield), and those deposited with ATCC as accession numbers ATCC VR-977 and ATCC VR-260.

[0201] Also contemplated are alpha virus gene therapy vectors that can be employed in this invention. Preferred alpha virus vectors are Sindbis viruses vectors. Togaviruses, Semliki Forest virus (ATCC VR-67; ATCC VR-1247), Middleberg virus (ATCC VR-370), Ross River virus (ATCC VR-373; ATCC VR-1246), Venezuelan equine encephalitis virus (ATCC VR923; ATCC VR-1250; ATCC VR-1249; ATCC VR-532), and those described in U.S. Pat. No. 5,091,309, 5,217,879, and WO92/10578. More particularly, those alpha virus vectors described in U.S. Ser. No. 08/405,627, filed Mar. 15, 1995,WO94/21792, WO92/10578, WO95/07994, U.S. Pat. Nos. 5,091,309 and US 5,217,879 are employable. Such alpha viruses may be obtained from depositories or collections such as the ATCC in Rockville, Md. or isolated from known sources using commonly available techniques. Preferably, alphavirus vectors with reduced cytotoxicity are used (see U.S. Ser. No. 08/679640).

[0202] DNA vector systems such as eukaryotic layered expression systems are also useful for expressing the nucleic acids of the invention. See WO95/07994 for a detailed description of eukaryotic layered expression systems. Preferably, the eukaryotic layered expression systems of the invention are derived from alphavirus vectors and most preferably from Sindbis viral vectors.

[0203] Other viral vectors suitable for use in the present invention include those derived from poliovirus, for example ATCC VR-58 and those described in Evans, Nature 339 (1989) 385 and Sabin (1973) J. Biol. Standardization 1:115; rhinovirus, for example ATCC VR-1110 and those described in Arnold (1990) J Cell Biochem L401; pox viruses such as canary pox virus or vaccinia virus, for example ATCC VR-111 and ATCC VR-2010 and those described in Fisher-Hoch (1989) Proc Natl Acad Sci 86:317; Flexner (1989) Ann NY Acad Sci 569:86, Flexner (1990) Vaccine 8:17; in U.S. Pat. Nos. 4,603,112 and US 4,769,330 and WO89/01973; SV40 virus, for example ATCC VR-305 and those described in Mulligan (1979) Nature 277:108 and Madzak (1992) J Gen Virol 73:1533; influenza virus, for example ATCC VR-797 and recombinant influenza viruses made employing reverse genetics techniques as described in U.S. Pat. No. 5,166,057 and in Enami (1990) Proc Natl Acad Sci 87:3802-3805; Enami & Palese (1991) J Virol 65:2711-2713 and Luytjes (1989) Cell 59:110, (see also McMichael (1983) NEJ Med 309:13, and Yap (1978) Nature 273:238 and Nature (1979) 277:108); human immunodeficiency virus as described in EP-0386882 and in Buchschacher (1992) J. Virol. 66:2731; measles virus, for example ATCC VR-67 and VR-1247 and those described in EP-0440219; Aura virus, for example ATCC VR-368; Bebaru virus, for example ATCC VR-600 and ATCC VR-1240; Cabassou virus, for example ATCC VR-922; Chikungunya virus, for example ATCC VR-64 and ATCC VR-1241; Fort Morgan Virus, for example ATCC VR-924; Getah virus, for example ATCC VR-369 and ATCC VR-1243; Kyzylagach virus, for example ATCC VR-927; Mayaro virus, for example ATCC VR-66; Mucambo virus, for example ATCC VR-580 and ATCC VR-1244; Ndumu virus, for example ATCC VR-371; Pixuna virus, for example ATCC VR-372 and ATCC VR-1245; Tonate virus, for example ATCC VR-925; Triniti virus, for example ATCC VR-469; Una virus, for example ATCC VR-374; Whataroa virus, for example ATCC VR-926; Y-62-33 virus, for example ATCC VR-375; O'Nyong virus, Eastern encephalitis virus, for example ATCC VR-65 and ATCC VR-1242; Western encephalitis virus, for example ATCC VR-70, ATCC VR-1251, ATCC VR-622 and ATCC VR-1252; and coronavirus, for example ATCC VR-740 and those described in Hamre (1966) Proc Soc Exp Biol Med 121:190.

[0204] Delivery of the compositions of this invention into cells is not limited to the above mentioned viral vectors. Other delivery methods and media may be employed such as, for example, nucleic acid expression vectors, polycationic condensed DNA linked or unlinked to killed adenovirus alone, for example see U.S. Ser. No. 08/366,787, filed Dec. 30, 1994 and Curiel (1992) Hum Gene Ther 3:147-154 ligand linked DNA, for example see Wu (1989) J Biol Chem 264:16985-16987, eucaryotic cell delivery vehicles cells, for example see U.S. Ser. No.08/240,030, filed May 9, 1994, and U.S. Ser. No. 08/404,796, deposition of photopolymerized hydrogel materials, hand-held gene transfer particle gun, as described in U.S. Pat. 5,149,655, ionizing radiation as described in U.S. Pat. No. 5,206,152 and in WO92/11033, nucleic charge neutralization or fusion with cell membranes. Additional approaches are described in Philip (1994) Mol Cell Biol 14:2411-2418 and in Woffendin (1994) Proc Natl Acad Sci 91:1581-1585.

[0205] Particle mediated gene transfer may be employed, for example see U.S. Ser. No. 60/023,867. Briefly, the sequence can be inserted into conventional vectors that contain conventional control sequences for high level expression, and then incubated with synthetic gene transfer molecules such as polymeric DNA-binding cations like polylysine, protamine, and albumin, linked to cell targeting ligands such as asialoorosomucoid, as described in Wu & Wu (1987) J. Biol. Chem. 262:4429-4432, insulin as described in Hucked (1990) Biochem Pharmacol 40:253-263, galactose as described in Plank (1992) Bioconjugate Chem 3:533-539, lactose or transferrin.

[0206] Naked DNA may also be employed. Exemplary naked DNA introduction methods are described in WO90/11092 and U.S. Pat. No.5,580,859. Uptake efficiency may be improved using biodegradable latex beads. DNA coated latex beads are efficiently transported into cells after endocytosis initiation by the beads. The method may be improved further by treatment of the beads to increase hydrophobicity and thereby facilitate disruption of the endosome and release of the DNA into the cytoplasm.

[0207] Liposomes that can act as gene delivery vehicles are described in U.S. Pat. No. 5,422,120, WO95/13796, WO94/23697, WO91/14445 and EP-524,968. As described in U.S. Ser. No. 60/023,867, on non-viral delivery, the nucleic acid sequences encoding a polypeptide can be inserted into conventional vectors that contain conventional control sequences for high level expression, and then be incubated with synthetic gene transfer molecules such as polymeric DNA-binding cations like polylysine, protamine, and albumin, linked to cell targeting ligands such as asialoorosomucoid, insulin, galactose, lactose, or transferrin. Other delivery systems include the use of liposomes to encapsulate DNA comprising the gene under the control of a variety of tissue-specific or ubiquitously-active promoters. Further non-viral delivery suitable for use includes mechanical delivery systems such as the approach described in Woffendin et al (1994) Proc. Natl. Acad. Sci. USA 91(24):11581-11585. Moreover, the coding sequence and the product of expression of such can be delivered through deposition of photopolymerized hydrogel materials. Other conventional methods for gene delivery that can be used for delivery of the coding sequence include, for example, use of hand-held gene transfer particle gun, as described in U.S. Pat. No. 5,149,655; use of ionizing radiation for activating transferred gene, as described in U.S. Pat. No. 5,206,152 and WO92/11033

[0208] Exemplary liposome and polycationic gene delivery vehicles are those described in U.S. Pat. Nos. 5,422,120 and 4,762,915; in WO 95/13796; WO94/23697; and WO91/14445; in EP-0524968; and in Stryer, Biochemistry, pages 236-240 (1975) W. H. Freeman, San Francisco; Szoka (1980) Biochem Biophys Acta 600:1; Bayer (1979) Biochem Biophys Acta 550:464; Rivnay (1987) Meth Enzymol 149:119; Wang (1987) Proc Natl Acad Sci 84:7851; Plant (1989) Anal Biochem 176:420.

[0209] A polynucleotide composition can comprises therapeutically effective amount of a gene therapy vehicle, as the term is defined above. For purposes of the present invention, an effective dose will be from about 0.01 mg/ kg to 50 mg/kg or 0.05 mg/kg to about 10 mg/kg of the DNA constructs in the individual to which it is administered.

Delivery Methods

[0210] Once formulated, the polynucleotide compositions of the invention can be administered (1) directly to the subject; (2) delivered ex vivo, to cells derived from the subject; or (3) in vitro for recombinant protein expression. The subjects to be treated can be mammals or birds. Also, human subjects can be treated.

[0211] Direct delivery of the compositions will generally be accomplished by injection, either subcutaneously, intraperitoneally, intravenously or intramuscularly or delivered to the interstitial space of a tissue. The compositions can also be administered into a lesion. Other modes of administration include oral and pulmonary administration, suppositories, and transdermal or transcutaneous applications (e.g. see WO98/20734), needles, and gene guns or hyposprays. Dosage treatment may be a single dose schedule or a multiple dose schedule.

[0212] Methods for the ex vivo delivery and reimplantation of transformed cells into a subject are known in the art and described in e.g. WO93/14778. Examples of cells useful in ex vivo applications include, for example, stem cells, particularly hematopoetic, lymph cells, macrophages, dendritic cells, or tumor cells.

[0213] Generally, delivery of nucleic acids for both ex vivo and in vitro applications can be accomplished by the following procedures, for example, dextran-mediated transfection, calcium phosphate precipitation, polybrene mediated transfection, protoplast fusion, electroporation, encapsulation of the polynucleotide(s) in liposomes, and direct microinjection of the DNA into nuclei, all well known in the art

Polynucleotide and Polypeptide Pharmaceutical Compositions

[0214] In addition to the pharmaceutically acceptable carriers and salts described above, the following additional agents can be used with polynucleotide and/or polypeptide compositions.

A.Polypeptides

[0215] One example are polypeptides which include, without limitation: asioloorosomucoid (ASOR); transferrin; asialoglycoproteins; antibodies; antibody fragments; ferritin; interleukins; interferons, granulocyte, macrophage colony stimulating factor (GM-CSF), granulocyte colony stimulating factor (G-CSF), macrophage colony stimulating factor (M-CSF), stem cell factor and erythropoietin. Viral antigens, such as envelope proteins, can also be used. Also, proteins from other invasive organisms, such as the 17 amino acid peptide from the circumsporozoite protein of plasmodium falciparum known as RII.

B.Hormones, Vitamins, etc.

[0216] Other groups that can be included are, for example: hormones, steroids, androgens, estrogens, thyroid hormone, or vitamins, folic acid.

C.Polyalkylenes, Polysaccharides, etc.

[0217] Also, polyalkylene glycol can be included with the desired polynucleotides/polypeptides. In a preferred embodiment, the polyalkylene glycol is polyethlylene glycol. In addition, mono-, di-, or polysaccharides can be included. In a preferred embodiment of this aspect, the polysaccharide is dextran or DEAE-dextran. Also, chitosan and poly(lactide-co-glycolide)

D.Lipids, and Liposomes

[0218] The desired polynucleotide/polypeptide can also be encapsulated in lipids or packaged in liposomes prior to delivery to the subject or to cells derived therefrom.

[0219] Lipid encapsulation is generally accomplished using liposomes which are able to stably bind or entrap and retain nucleic acid. The ratio of condensed polynucleotide to lipid preparation can vary but will generally be around 1:1 (mg DNA:micromoles lipid), or more of lipid. For a review of the use of liposomes as carriers for delivery of nucleic acids, see, Hug and Sleight (1991) Biochim. Biophys. Acta. 1097:1-17; Straubinger (1983) Meth. Enzymol. 101:512-527.

[0220] Liposomal preparations for use in the present invention include cationic (positively charged), anionic (negatively charged) and neutral preparations. Cationic liposomes have been shown to mediate intracellular delivery of plasmid DNA (Felgner (1987) Proc. Natl. Acad. Sci. USA 84:7413-7416); mRNA (Malone (1989) Proc. Natl. Acad. Sci. USA 86:6077-6081); and purified transcription factors (Debs (1990) J. Biol. Chem. 265:10189-10192), in functional form.

[0221] Cationic liposomes are readily available. For example, N[1-2,3-dioleyloxy)propyl]-N,N,N-triethylammonium (DOTMA) liposomes are available under the trademark Lipofectin, from GIBCO BRL, Grand Island, N.Y. (See, also, Felgner supra). Other commercially available liposomes include transfectace (DDAB/DOPE) and DOTAP/DOPE (Boerhinger). Other cationic liposomes can be prepared from readily available materials using techniques well known in the art. See, e.g. Szoka (1978) Proc. Natl. Acad. Sci. USA 75:4194-4198; WO90/11092 for a description of the synthesis of DOTAP (1,2-bis(oleoyloxy)-3-(trimethylammonio)propane) liposomes.

[0222] Similarly, anionic and neutral liposomes are readily available, such as from Avanti Polar Lipids (Birmingham, Ala.), or can be easily prepared using readily available materials. Such materials include phosphatidyl choline, cholesterol, phosphatidyl ethanolamine, dioleoylphosphatidyl choline (DOPC), dioleoylphosphatidyl glycerol (DOPG), dioleoylphoshatidyl ethanolamine (DOPE), among others. These materials can also be mixed with the DOTMA and DOTAP starting materials in appropriate ratios. Methods for making liposomes using these materials are well known in the art.

[0223] The liposomes can comprise multilammelar vesicles (MLVs), small unilamellar vesicles (SUVs), or large unilamellar vesicles (LUVs). The various liposome-nucleic acid complexes are prepared using methods known in the art. See e.g. Straubinger (1983) Meth. Immunol. 101:512-527; Szoka (1978) Proc. Natl. Acad Sci. USA 75:4194-4198; Papahadjopoulos (1975) Biochim. Biophys. Acta 394:483; Wilson (1979) Cell 17:77); Deamer & Bangham (1976) Biochim. Biophys. Acta 443:629; Ostro (1977) Biochem. Biophys. Res. Commun. 76:836; Fraley (1979) Proc. Natl. Acad. Sci. USA 76:3348); Enoch & Strittmatter (1979) Proc. Natl. Acad Sci. USA 76:145; Fraley (1980) J. Biol. Chem. (1980) 255:10431; Szoka & Papahadjopoulos (1978) Proc. Natl. Acad Sci. USA 75:145; and Schaefer-Ridder (1982) Science 215:166.

E.Lipoproteins

[0224] In addition, lipoproteins can be included with the polynucleotide/polypeptide to be delivered. Examples of lipoproteins to be utilized include: chylomicrons, HDL, IDL, LDL, and VLDL. Mutants, fragments, or fusions of these proteins can also be used. Also, modifications of naturally occurring lipoproteins can be used, such as acetylated LDL. These lipoproteins can target the delivery of polynucleotides to cells expressing lipoprotein receptors. Preferably, if lipoproteins are including with the polynucleotide to be delivered, no other targeting ligand is included in the composition.

[0225] Naturally occurring lipoproteins comprise a lipid and a protein portion. The protein portion are known as apoproteins. At the present, apoproteins A, B, C, D, and E have been isolated and identified. At least two of these contain several proteins, designated by Roman numerals, AI, AII, AIV; CI, CII, CIII.

[0226] A lipoprotein can comprise more than one apoprotein. For example, naturally occurring chylomicrons comprises of A, B, C, & E, over time these lipoproteins lose A and acquire C and E apoproteins. VLDL comprises A, B, C, & E apoproteins, LDL comprises apoprotein B; HDL comprises apoproteins A, C, & E.

[0227] The amino acid of these apoproteins are known and are described in, for example, Breslow (1985) Annu Rev. Biochem 54:699; Law (1986) Adv. Exp Med. Biol. 151:162; Chen (1986) J Biol Chem 261:12918; Kane (1980) Proc Natl Acad Sci USA 77:2465; and Utermann (1984) Hum Genet 65:232.

[0228] Lipoproteins contain a variety of lipids including, triglycerides, cholesterol (free and esters), and phospholipids. The composition of the lipids varies in naturally occurring lipoproteins. For example, chylomicrons comprise mainly triglycerides. A more detailed description of the lipid content of naturally occurring lipoproteins can be found, for example, in Meth. Enzynol. 128 (1986). The composition of the lipids are chosen to aid in conformation of the apoprotein for receptor binding activity. The composition of lipids can also be chosen to facilitate hydrophobic interaction and association with the polynucleotide binding molecule.

[0229] Naturally occurring lipoproteins can be isolated from serum by ultracentrifugation, for instance. Such methods are described in Meth Enzymol. (supra); Pitas (1980) J. Biochem. 255:5454-5460 and Mahey (1979) J Clin. Invest 64:743-750. Lipoproteins can also be produced by in vitro or recombinant methods by expression of the apoprotein genes in a desired host cell. See, for example, Atkinson (1986) Annu Rev Biophys Chem 15:403 and Radding (1958) Biochim Biophys Acta 30:443. Lipoproteins can also be purchased from commercial suppliers, such as Biomedical Techniologies, Inc., Stoughton, Mass., USA. Further description of lipoproteins can be found in Zuckermann et al. WO98/06437.

F.Polycationic Agents

[0230] Polycationic agents can be included, with or without lipoprotein, in a composition with the desired polynucleotide/polypeptide to be delivered.

[0231] Polycationic agents, typically, exhibit a net positive charge at physiological relevant pH and are capable of neutralizing the electrical charge of nucleic acids to facilitate delivery to a desired location. These agents have both in vitro, ex vivo, and in vivo applications. Polycationic agents can be used to deliver nucleic acids to a living subject either intramuscularly, subcutaneously, etc.

[0232] The following are examples of useful polypeptides as polycationic agents: polylysine, polyarginine, polyornithine, and protamine. Other examples include histones, protamines, human serum albumin, DNA binding proteins, non-histone chromosomal proteins, coat proteins from DNA viruses, such as (X174, transcriptional factors also contain domains that bind DNA and therefore may be useful as nucleic aid condensing agents. Briefly, transcriptional factors such as C/CEBP, c-jun, c-fos, AP-1, AP-2, AP-3, CPF, Prot-1, Sp-1, Oct-1, Oct-2, CREP, and TFIID contain basic domains that bind DNA sequences.

[0233] Organic polycationic agents include: spermine, spermidine, and purtrescine.

[0234] The dimensions and of the physical properties of a polycationic agent can be extrapolated from the list above, to construct other polypeptide polycationic agents or to produce synthetic polycationic agents.

[0235] Synthetic polycationic agents which are useful include, for example, DEAE-dextran, polybrene. Lipofectin™, and lipofectAMINE™ are monomers that form polycationic complexes when combined with polynucleotides/polypeptides.

Nucleic Acid Hybridisation

[0236] “Hybridization” refers to the association of two nucleic acid sequences to one another by hydrogen bonding. Typically, one sequence will be fixed to a solid support and the other will be free in solution. Then, the two sequences will be placed in contact with one another under conditions that favor hydrogen bonding. Factors that affect this bonding include: the type and volume of solvent; reaction temperature; time of hybridization; agitation; agents to block the non-specific attachment of the liquid phase sequence to the solid support (Denhardt's reagent or BLOTTO); concentration of the sequences; use of compounds to increase the rate of association of sequences (dextran sulfate or polyethylene glycol); and the stringency of the washing conditions following hybridization. See Sambrook et al. [supra] vol. 2, chapt. 9, pp. 9.47 to 9.57.

[0237] “Stringency” refers to conditions in a hybridization reaction that favor association of very similar sequences over sequences that differ. For example, the combination of temperature and salt concentration should be chosen that is approximately 120 to 200° C. below the calculated Tm of the hybrid under study. The temperature and salt conditions can often be determined empirically in preliminary experiments in which samples of genomic DNA immobilized on filters are hybridized to the sequence of interest and then washed under conditions of different stringencies. See Sambrook et al. at page 9.50.

[0238] Variables to consider when performing, for example, a Southern blot are (1) the complexity of the DNA being blotted and (2) the homology between the probe and the sequences being detected. The total amount of the fragment(s) to be studied can vary a magnitude of 10, from 0.1 to 1 μg for a plasmid or phage digest to 10⁻⁹ to 10⁻⁸ g for a single copy gene in a highly complex eukaryotic genome. For lower complexity polynucleotides, substantially shorter blotting, hybridization, and exposure times, a smaller amount of starting polynucleotides, and lower specific activity of probes can be used. For example, a single-copy yeast gene can be detected with an exposure time of only 1 hour starting with 1 μg of yeast DNA, blotting for two hours, and hybridizing for 4-8 hours with a probe of 10⁸ cpm/μg. For a single-copy mammalian gene a conservative approach would start with 10 μg of DNA, blot overnight, and hybridize overnight in the presence of 10% dextran sulfate using a probe of greater than 10⁸ cpm/μg, resulting in an exposure time of ˜24 hours.

[0239] Several factors can affect the melting temperature (Tm) of a DNA-DNA hybrid between the probe and the fragment of interest, and consequently, the appropriate conditions for hybridization and washing. In many cases the probe is not 100% homologous to the fragment. Other commonly encountered variables include the length and total G+C content of the hybridizing sequences and the ionic strength and formamide content of the hybridization buffer. The effects of all of these factors can be approximated by a single equation:
Tm=81+16.6(log₁₀Ci)+0.4[%(G +C)]−0.6(%formamide)−600/n−1.5(%mismatch).
where Ci is the salt concentration (monovalent ions) and n is the length of the hybrid in base pairs (slightly modified from Meinkoth & Wahl (1984) Anal. Biochem. 138: 267-284).

[0240] In designing a hybridization experiment, some factors affecting nucleic acid hybridization can be conveniently altered. The temperature of the hybridization and washes and the salt concentration during the washes are the simplest to adjust. As the temperature of the hybridization increases (ie. stringency), it becomes less likely for hybridization to occur between strands that are nonhomologous, and as a result, background decreases. If the radiolabelled probe is not completely homologous with the immobilized fragment (as is frequently the case in gene family and interspecies hybridization experiments), the hybridization temperature must be reduced, and background will increase. The temperature of the washes affects the intensity of the hybridizing band and the degree of background in a similar manner. The stringency of the washes is also increased with decreasing salt concentrations.

[0241] In general, convenient hybridization temperatures in the presence of 50% formamide are 42° C. for a probe with is 95% to 100% homologous to the target fragment, 37° C. for 90% to 95% homology, and 32° C. for 85% to 90% homology. For lower homologies, formamide content should be lowered and temperature adjusted accordingly, using the equation above. If the homology between the probe and the target fragment are not known, the simplest approach is to start with both hybridization and wash conditions which are nonstringent. If non-specific bands or high background are observed after autoradiography, the filter can be washed at high stringency and reexposed. If the time required for exposure makes this approach impractical, several hybridization and/or washing stringencies should be tested in parallel.

Nucleic Acid Probe Assays

[0242] Methods such as PCR, branched DNA probe assays, or blotting techniques utilizing nucleic acid probes according to the invention can determine the presence of cDNA or mRNA. A probe is said to “hybridize” with a sequence of the invention if it can form a duplex or double stranded complex, which is stable enough to be detected.

[0243] The nucleic acid probes will hybridize to the Neisserial nucleotide sequences of the invention (including both sense and antisense strands). Though many different nucleotide sequences will encode the amino acid sequence, the native Neisserial sequence is preferred because it is the actual sequence present in cells. mRNA represents a coding sequence and so a probe should be complementary to the coding sequence; single-stranded cDNA is complementary to mRNA, and so a cDNA probe should be complementary to the non-coding sequence.

[0244] The probe sequence need not be identical to the Neisserial sequence (or its complement)—some variation in the sequence and length can lead to increased assay sensitivity if the nucleic acid probe can form a duplex with target nucleotides, which can be detected. Also, the nucleic acid probe can include additional nucleotides to stabilize the formed duplex. Additional Neisserial sequence may also be helpful as a label to detect the formed duplex. For example, a non-complementary nucleotide sequence may be attached to the 5′ end of the probe, with the remainder of the probe sequence being complementary to a Neisserial sequence. Alternatively, non-complementary bases or longer sequences can be interspersed into the probe, provided that the probe sequence has sufficient complementarity with the a Neisserial sequence in order to hybridize therewith and thereby form a duplex which can be detected.

[0245] The exact length and sequence of the probe will depend on the hybridization conditions, such as temperature, salt condition and the like. For example, for diagnostic applications, depending on the complexity of the analyte sequence, the nucleic acid probe typically contains at least 10-20 nucleotides, preferably 15-25, and more preferably ≧30 nucleotides, although it may be shorter than this. Short primers generally require cooler temperatures to form sufficiently stable hybrid complexes with the template.

[0246] Probes may be produced by synthetic procedures, such as the triester method of Matteucci et al. [J. Am. Chem. Soc. (1981) 103:3185], or according to Urdea et al. [Proc. Natl. Acad. Sci. USA (1983) 80: 7461], or using commercially available automated oligonucleotide synthesizers.

[0247] The chemical nature of the probe can be selected according to preference. For certain applications, DNA or RNA are appropriate. For other applications, modifications may be incorporated e.g. backbone modifications, such as phosphorothioates or methylphosphonates, can be used to increase in vivo half-life, alter RNA affinity, increase nuclease resistance etc. [e.g. see Agrawal & Iyer (1995) Curr Opin Biotechnol 6:12-19; Agrawal (1996) TIBTECH 14:376-387]; analogues such as peptide nucleic acids may also be used [e.g. see Corey (1997) TIBTECH 15:224-229; Buchardt et al. (1993) TIBTECH 11 :384-386].

[0248] Alternatively, the polymerase chain reaction (PCR) is another well-known means for detecting small amounts of target nucleic acids. The assay is described in: Mullis et al. [Meth. Enzymol. (1987) 155: 335-350]; U.S. Pat. No. 4,683,195 & 4,683,202. Two ‘primers’ hybridize with the target nucleic acids and are used to prime the reaction. The primers can comprise sequence that does not hybridize to the sequence of the amplification target (or its complement) to aid with duplex stability or, for example, to incorporate a convenient restriction site. Typically, such sequence will flank the desired Neisserial sequence.

[0249] A thermostable polymerase creates copies of target nucleic acids from the primers using the original target nucleic acids as a template. After a threshold amount of target nucleic acids are generated by the polymerase, they can be detected by more traditional methods, such as Southern blots. When using the Southern blot method, the labelled probe will hybridize to the Neisserial sequence (or its complement).

[0250] Also, mRNA or cDNA can be detected by traditional blotting techniques described in Sambrook et al [supra]. mRNA, or cDNA generated from mRNA using a polymerase enzyme, can be purified and separated using gel electrophoresis. The nucleic acids on the gel are then blotted onto a solid support, such as nitrocellulose. The solid support is exposed to a labelled probe and then washed to remove any unhybridized probe. Next, the duplexes containing the labelled probe are detected. Typically, the probe is labelled with a radioactive moiety.

### BRIEF DESCRIPTION OF THE DRAWINGS

[0251] FIG. 1 shows the overall strategy for 2D-PAGE. The individual gels are shown as FIGS. 2 to 4.

[0252] FIG. 5 shows the results of a protein query of the NCBI Entrez system using the term ‘NMB1506’.

### MODES FOR CARRYING OUT THE INVENTION

[0253] The overall strategy for identifying membrane proteins was to use two dimensional electrophoresis to separate the proteins in a N.meningitidis membrane preparation, followed by identification of proteins found in the electrophoretic gel. This experiment was not straightforward because, as is well known, preparing a membrane fraction which is not contaminated with cytoplasmic proteins is extremely difficult.

[0254] Some of the proteins identified by electrophoresis were expected to be there, but many were not. Furthermore, several proteins which were annotated as “hypothetical” have now been shown to exist in vivo—they are not artefacts. A further point to note is that proteins visible on a 2D gel must be expressed at least at a moderate level, thus making them useful targets for binding.

Preparation of Membrane Fraction

[0255] To prepare the membrane fraction, N.meningitidis strain MC58 was growth in liquid “base for the isolation of pathogenic Neisseria” (GC, Difco), supplemented with 4 g/l glucose, 0.1 g/l glutamine, and 2.2 mg/l cocarboxylase, at 37° C. in a humidified atmosphere containing 5% CO₂. Bacteria were harvested at OD₆₀₀ₙₘ=0.5 by centrifugation at 10,000 g for 20 minutes. The pellet was resuspended with 10 ml Tris-base containing the EDTA-free protease inhibitor cocktail used according to the manufacturer (Roche Diagnostic Mannhein, Germany). The bacteria were inactivated 45 minutes at 56° C., cooled in ice in presence of 1,000 U benzonase, and were disrupted with a French Press at 18000 psi (4 passages). The lysate was centrifuged at 70,000 g overnight at 5° C. The pellet was washed twice with 40 mM Tris-base and resuspended in 10 ml of 5 M urea, 2 M thiourea, 2% (w/v) CHAPS, 2% (w/v) ASB 14, 0.5% (v/v) C.A., 2 mM TBP and centrifuged at 100,000 g at 10° C. for 3 hours. Supernatant containing solubilised membrane proteins was aliquoted and stored at −80° C.

[0256] This process is quick, easy to use, and results in a membrane preparation with little or no contamination from cytosolic proteins [e.g. refs. 112 to 115]. It was improved by using new techniques for the solubilisation of bacterial membrane proteins prior and during to isoelectric focusing, in order to optimise the separation of outer membrane proteins by two-dimensional electrophoresis (2DE). Thirourea was thus used with the urea as chaotropic agents [112], the zwitterionic detergent ASB-14 was used in association with CHAPS [116], and tributyl phosphine was added prior to 2DE [117].

2D Electrophoresis

[0257] 200 μg of the membrane proteins were brought to a final volume of 125 μl with reswelling solution (7 M urea, 2 M thiourea, 2% (w/v) CHAPS, 2% (w/v) ASB 14, 2% (v/v) adequate ampholine (Amersham Pharmacia Biotech (Piscataway, N.J.), 2 mM thiobutyl phosphine). The proteins were absorbed overnight onto an Immobiline DryStrip (7 cm; pH-gradient 3-10 non linear, pH-gradient, 4-7 or 6-11 linear) using the Immobiline Dry-Strip Reswelling Tray (Amersham Pharmacia Biotech (Piscataway, N.J.). Proteins were then separated by 2D electrophoresis. The first dimension was run on an IPGphor Isoelectric Focusing Unit (Amersham Pharmacia Biotech, Piscataway, N.J.), The proteins were separated applying sequentially 150 V for 35 min., 500 V for 35 min., 1000 V for 30 min, 2600 V for 10 min., 3500 V for 15 min., 4200 V for 15 min., and then 5000 V to reach 10 kVh. For the second dimension, the strips were equilibrated as described in ref. 117 and the proteins were separated on a linear 9-16% acrylamide SDS-PAGE (1.5 mm thick, 6 cm high) using the Mini Proten II Cell from BioRad. The 2D gel was stained with colloidal Coomassie [118]. Gels were scanned with a Personal densitometer SI (Molecular Dynamics) at 12 bits and 50 μm per pixel.

[0258] The initial 2D IPG gradient gel is shown in FIG. 2. 325 protein spots were visualised by colloidal Coomassie blue. In order to increase the spot number, 200 μg of the same protein fraction was separated on 2D gels with a pH gradients of 4-7 (FIG. 3) and 6-11 (FIG. 4). 498 and 187 spots were visualised by colloidal Coomassie blue in these gels, respectively. Each gel was performed and analysed in duplicate, with no major differences observed between duplicates.

Spot Excision

[0259] A total of 1,867 protein spots were excised from the three gels, plus the duplicated gels, in-gel digested with trypsin, and the generated peptides were analysed by MALDI-TOF mass spectrometry. Proteins were identified by interpreting their peptide mass fingerprint using the software Mascot.

[0260] The protocol used for in-gel digestion was a modification of reference 119. Protein spots were excised from the gel, washed sequentially with Milli-Q water and acetonitrile (1/1, v/v), and dried by a Speed Vac vacuum centrifuge apparatus (Savant, Holbrook, N.Y.). The pieces of gel were re-hydrated by adding 7-10 μl of a solution of 50 mM ammonium bicarbonate, 5 mM CaCl₂ containing 12 mg/l trypsin sequencing grade (Roche Diagnostic Corporation, Indianapolis, Ind.). The tryptic digestion was allowed to run for 18 hours at 37° C. Following digestion, the peptides were extracted by sonication in a sonicator bath with 50 μl 50% acetonitrile, 5% TFA for 30 min. The extraction was repeated, extract solutions were pooled together and the volume was reduced to 10 μl in a Speed Vac vacuum centrifuge apparatus. The samples were automatically prepared for mass spectrometry using the MAP II (Bruker, Bremen, Germany). The instrument was programmed to perform a desalting of the sample with ZIP-TIP (C18, Millipore). The peptides were eluted from the ZIP TIP with a solution of 5 g/l of 2,5-dihydroxybenzoic acid in 50% acetonitrile/0,1% TFA and directly loaded onto the Anchorchip (400 μm, Bruker, Bremen, Germany), The samples were allowed to air dry at room temperature.

Excised Spot Analysis

[0261] MALDI-TOF spectra were acquired on a Bruker Biflex II MALDI-TOF (Bremen, Germany) equipped with the SCOUT 381 multiprobe ion source in a positive-ion reflector mode. The acceleration voltage was set to 19 kV and the reflector voltage was set to 20 kV. Typically about 100 laser shots were average per spectrum from a 337 nm N2 laser. Spectra were externally calibrated using a combination of angiotensin II (1,046.54 Da), substance P (1,347.74 Da), Bombensin (1,619.82 Da) and ACTH18-39 (Clip human, 2,465.20 Da). Peptides were selected in the mass range of 700-3000 Da. Resulting values for monoisotopic peaks were used for search using the software Mascot run on a database containing the genome information of N.meningitidis and C.pneumoniae. All the searches were performed using a window of 500 ppm as constraint, allowing one missed cleavage, and considering propiamide cysteines as fixed modification, and oxidized methionine as variable modification. Signals generated from keratin digestion or trypsin autolysis were not considered for the search in the database. Proteins were successfully identified when the MOWSE score was superior to 47. When proteins were identified with an inferior Mowse score, Post Source Decay (PSD) experiments were performed to confirm the identification. PSD spectra of the parent ions were built by pasting the spectra obtain with successive reflector voltage from 20 to 0.59 V.

[0262] Within the FIG. 2 gel, 261/325 spots were identified by peptide mass fingerprint. When the same protein was identified in two or more samples from a train of spots clearly arising from isoforms of the same protein, the identification was extended to cover all spots in this row. When needed, the identification of the proteins were confirmed by PSD experiments, mainly for protein with a Mr inferior to 15 kDa. The remaining 64/325 spots contained too little protein material to give an unambiguous identification. The identified 261 spots were encoded by 138 separate genes, of which 11 were confirmed by PSD experiments. An additional 18 proteins were identified from the duplicated gel.

[0263] The FIG. 3 gel allowed the identification of 194 unique proteins, of which 72 were not identified from the FIG. 2 gel. Similarly, the FIG. 4 gel allowed the identification of 87 unique proteins of which 26 were not identified from the FIG. 2 gel.

[0264] The identified proteins are listed in Table 1, with columns indicating which gel they were found in. In summary, among the 1,867 proteins spots processed, 1,433 proteins were identified. The identified spots represent 250 unique proteins. Only 8.8% of the proteins were identified from the pH 6-11 gels which confirms the difficulty of separating very basic proteins by 2DE. The identified proteins cover 11.58% of the predicted ORFs encoded by the genome [1].

[0265] Within the 250 proteins, 45 acted as positive controls, as they had previously been identified as useful vaccine/diagnostic antigens in references 120 to 122. These 45 proteins are indicated with a ‘+’ in Table 1. The remaining 205 proteins are listed as SEQ ID NO^{s} 1 to 205.

[0266] Within the remaining 205 proteins, 138 completely elude the PSORT subcellular localisation algorithm [123, 124]. These 138 are marked with a ‘*’ in Table 1, and it is particularly surprising to find these proteins in the membrane. Of these 138, 76 elude various algorithmic predictions, and this subset is marked ‘**’.

OMV Analysis

[0267] In a separate series of experiments, outer membrane vesicles from serogroup B strains 394/98 (New Zealand) and H44/76 (Norway) were proteomically analysed. Sera from humans immunised with one of the two OMV preparations were analysed, and nine specific immunogenic proteins were identified: NMB 0182, 0382, 0634, 0763, 1126, 1342, 1429, 1799 & 2039. Of these 9 proteins: NMB 0382, 0634, 0763, 1342, 1429 & 2039 are in common with SEQ IDs 1 to 205; NMB0182 is a known immunogen [125]; NMB1126 (gi:7226362; SEQ ID 206) is annotated as ‘hypothetical protein’, having been identified only through GLIMMER2 prediction, and was not previously recognised as an immunogen; NMB1799 (gi:7227052; SEQ ID 207) is annotated as ‘S-adenosylmethionine synthetase’, which is a metabolic enzyme which would not normally be expected to be immunoaccessible. SEQ IDs 208-217 were not previously recognised as immunogens.

[0268] Proteins which were present in the 394/98 OMVs, but not in the H44/76 OMVs, were: 0007, 0018, 0031, 0051, 0052, 0089, 0110, 0130, 0132, 0168, 0214, 0336, 0375, 0423, 0427, 0462, 0554, 0586, 0604, 0610, 0623, 0626, 0634, 0652, 0758, 0854, 0920, 0944, 0954, 0955, 0959, 0983, 1046, 1055, 1127, 1153, 1191, 1199, 1201, 1228, 1240, 1285, 1313, 1332, 1339, 1358, 1392, 1437, 1457, 1460, 1506, 1518, 1533, 1554, 1572, 1577, 1594, 1612, 1642, 1668, 1684, 1710, 1762, 1796, 1812, 1849, 1854, 1855, 1861, 1874, 1903, 1921, 1949, 1953, 2086, 2102, 2129, 2134, 2138, 2159.

[0269] Proteins which were present in the H44/76 OMVs, but not in the 394/98 OMVs, were: 0143, 0204, 0280, 0313, 0410, 0477, 0546, 0638, 0889, 1011, 1124, 1162, 1342, 1540, 1714, 1799, 1808, 1969, 1998, 2069, 2103, 2154.

[0270] Proteins which were present in both OMV preparations were: 0035, 0088, 0109, 0124, 0126, 0138, 0139, 0154, 0157, 0171, 0182, 0219, 0359, 0382, 0387, 0426, 0461, 0595, 0617, 0618, 0631, 0663, 0703, 0757, 0763, 0787, 0875, 0876, 0943, 0946, 0957, 1053, 1126, 1131, 1252, 1301, 1323, 1341, 1429, 1445, 1497, 1567, 1574, 1576, 1869, 1934, 1936, 1946, 1972, 1988, 2039, 2096, 2101.

[0271] It will be understood that the invention is described above by way of example only and modifications may be made whilst remaining within the scope and spirit of the invention.

TABLE 1

| | | | Gel (Fig.) | | | |
|---|---|---|---|---|---|---|
| | NMB | ID (gi: 722xxxx): name/MW/pl | 2 | 3 | 4 | Note |
| 1 | 0010 | 5235: phosphoglycerate kinase/41902/5.12 | | X | | |
| 2 | 0018 | 5244: pilin PilE/15 246/9.21 | X | | X | |
| 3 | 0030 | 5249: methionyl-tRNA synthetase/76 853/5.44 | | X | | |
| 4 | 0035 | 5255: conserved hypothetical protein/40 218/4.74 | X | X | | + |
| 5 | 0038 | 5258: UDP-N-acetylglucosamine pyrophosphorylase/49 013/6.48 | X | | X | |
| 6 | 0045 | 5266: signal recognition particle protein/45 142/4.85 | | X | | * |
| 7 | 0051 | 5271: twitching motility protein/45 675/6.51 | X | | X | * |
| 8 | 0052 | 5272: twitching motility protein PilT/38 050/6.61 | X | | X | ** |
| 9 | 0068 | 5288: polysialic acid capsule biosynthesis protein SiaC/38821/5.35 | | X | | * |
| 10 | 0088 | 5306: outer membrane protein P1, putative/45 902/9.35 | X | | X | + |
| 11 | 0089 | 5307: pyruvate kinase II/52 435/5; 27 | X | X | | * |
| 12 | 0109 | 5324: conserved hypothetical protein/43 188/6.77 | X | | X | * |
| 13 | 0115 | 5331: nitrogen assimilation regulatory protein NtrX/46373/4.98 | X | | | ** |
| 14 | 0124/0139 | 5341-5357: translation elongation factor TU/42 909-42 925/5.07 | X | X | X | ** |
| 15 | 0126 | 5343: transcription antitermination protein NusG/20 550/6.03 | X | X | | ** |
| 16 | 0128 | 5345: 50S ribosomal protein L1/24 102/9.59 | X | X | X | * |
| 17 | 0130 | 5347: 50S ribosomal protein L10/17 594/7.91 | X | X | X | ** |
| 18 | 0131 | 5348: 50S ribosomal protein L7/L12/12623/4.60 | | X | | |
| 19 | 0132 | 5349: DNA-directed RNA polymerase, beta subunit/155 945/5.34 | X | X | X | |
| 20 | 0133 | 5351: DNA-directed RNA polymerase, beta′ subunit/154660/6.86 | | | X | * |
| 21 | 0137 | 5355: 30S ribosomal protein S7/10646/10.33 | | | X | * |
| 22 | 0138 | 5356: elongation factor G (EF-G)/77 244/5.08 | X | X | X | ** |
| 23 | 0140 | 5358: 30S ribosomal protein S10/11799/7.57 | | | X | ** |
| 24 | 0142 | 5360: 50S ribosomal protein L3/22664/10.03 | | | X | ** |
| 25 | 0143 | 5361: 50S ribosomal protein L4/23248/9.92 | | | X | ** |
| 26 | 0144 | 5362: 50S ribosomal protein L23/11268/9.85 | | | X | |
| 27 | 0154 | 5372: 50S ribosomal protein L5/20 323/9.49 | X | X | X | ** |
| 28 | 0156 | 5374: 30S ribosomal protein S8/14257/9.73 | | | X | * |
| 29 | 0157 | 5375: 50S ribosomal protein L6/18 892/9.63 | | X | X | * |
| 30 | 0159 | 5377: 30s ribosomal protein S5/18235/10.04 | | | X | * |
| 31 | 0168 | 5386: DNA-directed RNA polymerase, alpha subunit/36 076/4.94 | X | X | X | ** |
| 32 | 0171 | 5389: septum site-determining protein MinD/29 559/5.70 | X | X | | ** |
| 33 | 0173 | 5391: transcriptional regulator, LysR family/34 071/5.74 | X | X | | |
| 34 | 0181 | 5400: outer membrane protein OmpH, putative/19261/9.23 | | X | | + |
| 35 | 0182 | 5401: outer membrane protein Omp85/86 254/8.37 | X | | X | + |
| 36 | 0191 | 5411: ParA family protein/27 150/5.53 | X | | | + |
| 37 | 0193 | 5413: glucose inhibited division protein A/69 808/6.57 | X | | X | * |
| 38 | 0196 | 5417: ribonuclease E/102087/5.97 | | X | X | * |
| 39 | 0212 | 5433: DNA gyrase subunit B/88 188/5.46 | X | X | | * |
| 40 | 0214 | 5436: oligopeptidase A/76 054/5.16 | X | X | | + |
| 41 | 0219 | 5441: 3-oxoacyl-(acyl-carrier-protein) synthase II/43 221/5.36 | | X | | |
| 42 | 0246 | 5468: NADH dehydrogenase I, F subunit/48007/5.66 | | X | | * |
| 43 | 0278 | 5503: thiol:disulfide interchange protein DsbA/23 228/5.16/18 | X | X | X | + |
| 44 | 0286 | 5510: conserved hypothetical protein/22120/5.04 | | X | | * |
| 45 | 0292 | 5516: conserved hypothetical protein/22080/5.37 | | X | | + |
| 46 | 0294 | 5518: thiol:disulfide interchange protein DsbA/23 566/5.09 lipo | X | X | X | |
| 47 | 0329 | 5549: type IV pilus assembly protein/61 965/5.42 | X | X | | * |
| 48 | 0335 | 5555: 2,3,4,5-tetrahydropyridine-2-carboxylate N-succinyltransferase/29 410/5.42 | X | X | | ** |
| 49 | 0336 | 5556: enoyl-(acyl-carrier-protein) reductase/25 252/5.45/22 | | X | | |
| 50 | 0337 | 5557: branched-chain amino acid aminotransferase, putative/36421/5.80 | | X | | |
| 51 | 0345 | 5566: cell-binding factor, putative/31507/9.23 | | | X | + |
| 52 | 0351 | 5572: transaldolase/37 578/5.09 | | X | | ** |
| 53 | 0359 | 5581: glutamate-ammonia ligase/52137/5.20 | X | X | X | * |
| 54 | 0382 | 5603: outer membrane protein class 4/23 969/6.26 | X | X | X | |
| 55 | 0387 | 5608: ABC transporter, ATP-binding protein/62 073/5.23 | | X | X | + |
| 56 | 0390 | 5612: maltose phosphorylase/85 490/5.36 | X | X | | * |
| 57 | 0391 | 5613: beta-phosphoglucomutase/23728/5.08 | | X | | |
| 58 | 0426 | 5649: cell division protein FtsA/44 061/5.33 | X | X | | |
| 59 | 0427 | 5651: cell division protein FtsZ/41 487/4.94 | X | | | |
| 60 | 0446 | 5671: chorismate mutase/prephenate dehydratase/39778/5.65 | | X | | |
| 61 | 0462 | 5689: spermidine/putrescine ABC transporter, periplasmic . . . /50 556/6.92 | X | X | | |
| 62 | 0466 | 5693: aspartyl-tRNA synthetase/68 125/5.28 | X | X | X | ** |
| 63 | 0477 | 5705: conserved hypothetical protein/19758/5.19 | | X | | ** |
| 64 | 0530 | 5755: glycosyl hydrolase, family 3/39554/5.39 | | X | | ** |
| 65 | 0537 | 5762: conserved hypothetical protein/31 150/4.77 | | X | | + |
| 66 | 0540 | 5765: aspartate aminotransferase/43 929/6.52 | X | X | X | ** |
| 67 | 0546 | 5772: alcohol dehydrogenase, propanol-preferring/36 548/5.65 | X | X | | * |
| 68 | 0550 | 5777: thiol:disulfide interchange protein DsbC/26 451/6.93 | X | | | + |
| 69 | 0554 | 5780: dnaK protein/68 792/4.85 | X | X | X | + |
| 70 | 0564 | 5791: Na(+)-translocating NADH-quinone reductase, subunit F/42 303/4.95 | X | X | | |
| 71 | 0569 | 5796: Na(+)-translocating NADH-quinone reductase, subunit A/48 636/6.20 | X | X | X | + |
| 72 | 0589 | 5819: 50s ribosomal protein L19/13760/10.45 | | | X | ** |
| 73 | 0595 | 5825: DNA-binding response regulator/24 780/5.44 | X | X | | ** |
| 74 | 0604 | 5834: alcohol dehydrogenase, zinc-containing/38394/5.47 | | X | | |
| 75 | 0610 | 5840: spermidine/putrescine ABC transporter, ATP-binding protein/47 425/6.03 | X | X | | * |
| 76 | 0617 | 5847: transcription termination factor Rho/47 306/6.23 | X | | X | ** |
| 77 | 0618 | 5848: phosphoenolpyruvate synthase/87 170/5.01 | X | X | X | ** |
| 78 | 0623 | 5854: spermidine/putrescine ABC transporter, periplasmic . . . /39 511/5.38 | X | X | | |
| 79 | 0626 | 5856: peptide chain release factor 3/59 589/5.43 | | X | | + |
| 80 | 0631 | 5861: phosphate acetyltransferase Pta, putative/50306/4.83 | X | X | | |
| 81 | 0634 | 5862: iron(III) ABC transporter, periplasmic binding protein/35806/9.60 | | | X | |
| 82 | 0637 | 5866: argininosuccinate lyase/51 245/5.22 | X | X | | ** |
| 83 | 0641 | 5870: inorganic pyrophosphatase/19 812/4.71 | | X | | ** |
| 84 | 0663 | 5888: outer membrane protein NsgA/18386/9.64 | | | X | |
| 85 | 0667 | 5893: hypothetical protein/45 292/5.97/16 | X | X | | + |
| 86 | 0697 | 5925: dimethyladenosine transferase/29269/7.11 | | | X | ** |
| 87 | 0703 | 5932: competence lipoprotein ComL/29 273/8.72 | X | | X | |
| 88 | 0711 | 5938: conserved hypothetical protein/33516/6.11 | | X | | ** |
| 89 | 0720 | 5946: threonyl-tRNA synthetase/72 692/5.86 | X | X | | * |
| 90 | 0724 | 5951: phenylalanyl-tRNA synthetase, alpha chain/37 334/5.46 | X | X | X | ** |
| 91 | 0728 | 5955: phenylalanyl-tRNA synthetase, beta chain/86 050/5.19 | X | X | | * |
| 92 | 0743 | 5972: ubiquinone/menaquinone biosynthesis methlytransferase UbiE/27 366/7.14 | X | | X | ** |
| 93 | 0757 | 5987: phosphoribosylaminoimidazole-succinocarboxamide synthase/32476/5.26 | | X | | ** |
| 94 | 0758 | 5988: polyribonucleotide nucleotidyltransferase/76 422/5.35 | X | X | X | |
| 95 | 0763 | 5993: cysteine synthase/32 821/6.06 | X | X | | * |
| 96 | 0768 | 5999: twitching motility protein PilT/41 508/7.64 | X | X | X | + |
| 97 | 0778 | 6009: uroporphyrin-III C-methyltransferase HemX, putative/46 320/5.33 | X | X | | |
| 98 | 0787 | 6019: amino acid ABC transporter, periplasmic amino acid-binding protein/26 995/5.42 | X | X | | + |
| 99 | 0791 | 6024: peptidyl-prolyl cis-trans isomerase/181853/5.05 | | X | | ** |
| 100 | 0798 | 6031: cell division protein FtsH/70 058/5.07/20 | X | | | + |
| 101 | 0801 | 6034: delta-aminolevulinic acid dehydratase/36878/5.23 | | X | | + |
| 102 | 0804 | 6038: NAD(P)H nitroreductase, putative/24687/6.17 | | X | | * |
| 103 | 0814 | 6048: histidyl-tRNA synthetase/41 746/5.45 | X | X | | ** |
| 104 | 0815 | 6050: adenylosuccinate synthetase/46 250/5.77 | X | X | X | * |
| 105 | 0828 | 6063: ADP-L-glycero-D-mannoheptose-6-epimerase/38 437/5.68 | X | X | | |
| 106 | 0853 | 6089: conserved hypothetical protein/23 136/5.67 | | X | | + |
| 107 | 0854 | 6090: histidyl-tRNA synthetase/48 465/5.57 | X | X | | ** |
| 108 | 0875 | 6113: ribose-phosphate pyrophosphokinase/35 598/5.41 | X | X | | ** |
| 109 | 0876 | 6114: 50S ribosomal protein L25/20 956/6.60 | X | X | X | * |
| 110 | 0878 | 6116: threonine dehydratase/55585/5.41 | | X | | |
| 111 | 0884 | 6122: superoxide dismutase/21 893/5.78 | X | X | | * |
| 112 | 0885 | 6124: replicative DNA helicase/52 089/5.04 | X | X | | ** |
| 113 | 0889 | 6127: hypothetical protein/21970/6.40 | | X | | + |
| 114 | 0894 | 6131: aminotransferase, class I/44 013/5.79 | | X | | ** |
| 115 | 0920 | 6158: isocitrate dehydrogenase/80163/5.57 | X | X | X | * |
| 116 | 0928 | 6166: hypothetical protein/43 815/9.01 | X | | | + |
| 117 | 0944 | 6182: 5-methyltetrahydropteroyltriglutamate-homocysteine methyltransferase/85 078/5.27 | X | X | | |
| 118 | 0946 | 6184: peroxiredoxin 2 family protein/glutaredoxin/26 912/4.80 | X | X | | * |
| 119 | 0947 | 6186: lipoamide dehydrogenase, putative/44527/5.66 | X | X | | |
| 120 | 0950 | 6189: succinate dehydrogenase, flavoprotein subunit/66 787/5.84 | X | X | | + |
| 121 | 0955 | 6194: 2-oxoglutarate dehydrogenase, E1 component/105 082/6.24 | X | X | X | |
| 122 | 0956 | 6195: 2-oxoglutarate dehydrogenase, E2, dihydrolipoamide succinyltransferase/41491/5.14 | | X | | |
| 123 | 0959 | 6199: succinyl-CoA synthetase, beta subunit/41666/5.06 | | X | | |
| 124 | 0960 | 6200: succinyl-CoA synthetase, alpha subunit/30 548/6.00 | X | X | | |
| 125 | 0983 | 6223: phosphoribosylaminoimidazolecarboxamide formyltransferase . . . /56 803/5.90 | | X | | |
| 126 | 0997 | 6237: D-lactate dehydrogenase/64001/6.32 | | | X | |
| 127 | 1031 | 6270: 3-isopropylmalate dehydrogenase/39172/4.91 | | X | | ** |
| 128 | 1044 | 6284: ferredoxin-NADP reductase/29 314/5.72 | X | X | | * |
| 129 | 1046 | 6286: threonine synthase/51870/5.31 | | X | | * |
| 130 | 1053 | 6294: class 5 outer membrane protein/28 009/9.68/20 | X | X | X | |
| 131 | 1057 | 6297: gamma-glutamyltranspeptidase/65 071/5.99 | X | X | | + |
| 132 | 1070 | 6309: 2-isopropylmalate synthase/55 397/5.68 | | X | | ** |
| 133 | 1073 | 6313: conserved hypothetical protein/42 032/4.60 | | X | | ** |
| 134 | 1127 | 6364: oxidoreductase, short chain dehydrogenase/reductase family/25 917/5.99 | X | X | | ** |
| 135 | 1131 | 6368: chaperone protein HscA/66166/5.18 | | X | | ** |
| 136 | 1150 | 6387: dihydroxy-acid dehydratase/64 503/5.89 | X | X | | * |
| 137 | 1164/1126 | 6400-6362: hypothetical protein/22 025/8.03 (duplicated gene) | X | | X | + |
| 138 | 1199 | 6435: GTP binding protein/67 260/5.04 | X | X | | + |
| 139 | 1201 | 6438: IMP dehydrogenase/53 383/6.72 | X | | | * |
| 140 | 1206 | 6443: bacterioferritin B/18075/4.60 | | X | | ** |
| 141 | 1228 | 6467: homoserine dehydrogenase/44 737/5.254/20 | X | X | | |
| 142 | 1231 | 6470: ATP-dependent protease La/90590/6.18 | | X | X | * |
| 143 | 1238 | 6478: peptidyl-prolyl cis-trans isomerase-related protein/53213/5.68 | X | X | | + |
| 144 | 1240 | 6480: ABC transporter, ATP-binding protein/60 779/5.09 | X | X | | ** |
| 145 | 1252 | 6492: phosphoribosylformylglycinamidine cyclo-ligase/36 974/4.71 | X | | | ** |
| 146 | 1285 | 6525: enolase/46 134/4.78 | X | X | | + |
| 147 | 1301 | 6541: 30S ribosomal protein/61 177/4.9 | X | X | X | * |
| 148 | 1302 | 6542: integration host factor, beta subunit/11796/9.98 | | | X | ** |
| 149 | 1313 | 6554: trigger factor/48 325/4.72 | X | X | | ** |
| 150 | 1320 | 6562: 50S ribosomal protein L9/15 747/6.62 | X | X | X | |
| 151 | 1323 | 6565: 30S ribosomal protein S6/13 949/6.37 | X | X | X | ** |
| 152 | 1324 | 6566: thioredoxin reductase/33961/5.16 | | X | | |
| 153 | 1328 | 6571: conserved hypothetical protein/27021/6.41 | | | X | * |
| 154 | 1339 | 6583: prolyl-tRNA synthetase/62 992/5.09 | X | X | X | ** |
| 155 | 1341 | 6585: pyruvate dehydrogenase, E1 component/99 562/5.5 | X | X | X | ** |
| 156 | 1342 | 6586: pyruvate dehydrogenase, E2, dihydrolipoamide acetyltransferase/55 223/5.29 | X | X | | * |
| 157 | 1343 | 6587: hypothetical protein/16 339/4.99 | X | | | ** |
| 158 | 1344 | 6588: pyruvate dehydrogenase, E3 component, lipoamide dehydrogenase/62358/5.07 | | X | | |
| 159 | 1345 | 6590: hypothetical protein/57 143/5.13 | | X | | + |
| 160 | 1347 | 6591: extragenic suppressor protein SuhB/28 469/5.82 | X | X | | * |
| 161 | 1356 | 6601: Glu-tRNA(Gln)amidotransferase, subunit A/51 280/5.44 | X | | | * |
| 162 | 1358 | 6603: Glu-tRNA(Gln) amidotransferase, subunit B/51 912/5.05 | X | X | | ** |
| 163 | 1372 | 6618: ATP-dependent Clp protease, ATP-binding subunit ClpX/45 100/5.18 | | X | | * |
| 164 | 1379 | 7413462: nifS protein/44832/5.62 | | X | | ** |
| 165 | 1390 | 6628: glucokinase/34 951/8.59 | X | | X | |
| 166 | 1392 | 6630: glucose-6-phosphate 1-dehydrogenase/54124/5.30 | X | X | X | ** |
| 167 | 1425 | 6664: lysyl-tRNA synthetase, heat inducible/57312/5.34 | X | X | | ** |
| 168 | 1429 | 6669: outer membrane protein PorA/40 129/8.73 | X | X | X | |
| 169 | 1445 | 6686: recA protein/37 612/5.18 | | X | | * |
| 170 | 1452 | 6693: conserved hypothetical protein/40 598/8.33 | X | | | * |
| 171 | 1457 | 6698: transketolase/71 659/5.45 | X | X | X | * |
| 172 | 1471 | 6711: tryptophanyl-tRNA synthetase/37 616/5.65 | X | X | | * |
| 173 | 1472 | 6713: clpB protein/95 195/5.41 | | X | | ** |
| 174 | 1483 | 6723: lipoprotein NlpD, putative/42991/9.55 | | | X | + |
| 175 | 1506 | 6749: arginyl-tRNA synthetase/62 803/5.24 | | X | | |
| 176 | 1518 | 6762: acetate kinase/42 410/5.76 | X | X | | |
| 177 | 1533 | 6778: H.8 outer membrane protein/16 886/4.61/17 | X | X | | |
| 178 | 1536 | 6781: preprotein translocase SecA subunit/103 295/5.05 | X | X | | * |
| 179 | 1560 | 6807: glutaminyl-tRNA synthetase/64 650/57.74 | X | X | | ** |
| 180 | 1567 | 6815: macrophage infectivity potentiator/26 875/5.50 | X | X | | + |
| 181 | 1572 | 6819: aconitate hydratase 2/92 716 7 5.42 | X | X | | |
| 182 | 1574 | 6822: ketol-acid reductoisomerase/36 439/5.65 | X | X | | ** |
| 183 | 1577 | 6825: acetolactate synthase III, large subunit/62 813/5.88 | X | X | | |
| 184 | 1581 | 6829: histidinol dehydrogenase/46324/5.07 | X | X | | |
| 185 | 1583 | 6831: imidazoleglycerol-phosphate dehydratase/34002/8.61 | | | X | ** |
| 186 | 1584 | 6833: 3-hydroxyacid dehydrogenase/30 378/5.33 | | X | | + |
| 187 | 1594 | 6843: spermidine/putrescine ABC transporter, periplasmic . . . /40 234/5.52 | X | X | | + |
| 188 | 1595 | 6845: alanyl-tRNA synthetase/96 038/5.54 | X | | X | ** |
| 189 | 1604 | 6853: phosphoglycerate mutase/25 959/5.59 | X | X | | ** |
| 190 | 1612 | 6862: amino acid ABC transporter, periplasmic amino acid-binding protein/27 68/4.87 | X | X | | + |
| 191 | 1613 | 6863: fumarate hydratase, class I/54 951/5.12 | X | X | | + |
| 192 | 1621 | 6872: glutathione peroxidase/20129/5.18 | | X | | ** |
| 193 | 1636 | gi 7443356 opacity protein, authentic frameshift/27180/9.52 | | | X | |
| 194 | 1640 | 6890: phosphoserine aminotransferase/41651/5.20 | | X | | * |
| 195 | 1642 | 6892: N utilization substance protein A/55 752/4.54 | X | X | | ** |
| 196 | 1655 | 6907: adenine specific methylase, putative/33 956/4.36 | X | | | * |
| 197 | 1684 | 6938: seryl-tRNA synthetase/47 883/5.60 | X | | | ** |
| 198 | 1691 | 6945: dihydropteroate synthase/30 313/5.30 | | X | | |
| 199 | 1710 | 6965: glutamate dehydrogenase, NADP-specific/48 490/5.98 | X | X | | ** |
| 200 | 1714 | 6969: multidrug efflux pump channel protein/48 482/8.38/lipo | X | | X | + |
| 201 | 1716 | 6971: membrane fusion protein/40 209/8.60 | X | | X | |
| 202 | 1796 | 7050: conserved hypothetical protein/20 931/5.73 | X | X | | |
| 203 | 1809 | —: putative; pilN protein, authentic frameshift/22 258/9.00 | X | | | |
| 204 | 1810 | 7063: pilO protein/19 870/4.74 | | X | | |
| 205 | 1811 | 7064: pilP protein/20126/4.94 | | X | | |
| 206 | 1812 | —: putative, pilQ protein, authentic frameshift/83 151/10.75/25 | X | X | X | |
| 207 | 1835 | 7090: tyrosyl-tRNA synthetase/47437/5.76 | | X | | * |
| 208 | 1838 | 7093: GTP-binding protein, putative/39 376/4.80 | X | X | | ** |
| 209 | 1839 | 7094: formate-tetrahydrofolate ligase/59063/5.85 | X | X | | + |
| 210 | 1843 | 7099: transcriptional regulator, MarR family/16 583/5.15 | | X | | ** |
| 211 | 1849 | 7105: carbamoyl-phosphate synthase, small subunit/40 587/5.54 | X | X | | |
| 212 | 1854 | 7110: hypothetical protein/25 131/8.95 | X | | X | ** |
| 213 | 1855 | 7111: carbamoyl-phosphate synthase, large subunit/117 377/5.10 | X | X | | |
| 214 | 1856 | 7112: transcriptional regulator, LysR family/33367/5.55 | | X | | + |
| 215 | 1859 | 7116: S-adenosylmethionine:tRNA ribosyltransferase-isomerase/38216/6.20 | | X | | * |
| 216 | 1861 | 7118: acetyl-CoA carboxylase, biotin carboxylase/49 599/5.88 | X | X | X | ** |
| 217 | 1862 | 7119: ribosomal protein L11 methyltransferase/32144/4.36 | | X | | |
| 218 | 1864 | 7121: glutamate-1-semialdehyde 2,1-aminomutase/45 315/5.33 | | X | | * |
| 219 | 1869 | 7127: fructose-bisphosphate aldolase/38 337/5.48 | X | X | X | + |
| 220 | 1870 | 7128: hypothetical protein/26 964/7.23 | X | | X | + |
| 221 | 1903 | 7160: chromosomal replication initiator protein DnaA/58 029/5.93 | | X | | ** |
| 222 | 1920 | 7178: GMP synthase/57686/5.53 | X | X | | |
| 223 | 1921 | 7179: 3-oxoacyl-(acyl-carrier-protein) reductase/26 068/5.95 | X | X | X | * |
| 224 | 1930 | 7187: glycyl-tRNA synthetase, beta chain/74 574/5.86 | X | X | | |
| 225 | 1934 | 7192: ATP synthase F1, beta subunit/50 391/5.01 | X | X | X | |
| 226 | 1936 | 7194: ATP synthase F1, alpha subunit/55 291/5.43 | X | X | X | * |
| 227 | 1937 | 7195: ATP synthase F1, delta subunit/19 526/5.02 | | X | | ** |
| 228 | 1938 | 7196: ATP synthase F0, B subunit/17128/5.64 | | X | | |
| 229 | 1946 | 7205: outer membrane lipoprotein/29 258/5.01 | X | X | X | + |
| 230 | 1953 | 7212: stringent starvation protein A/23 165/6.23 | X | X | X | ** |
| 231 | 1966 | 7226: ABC transporter, ATP-binding protein/29 286/5.58 | | X | | * |
| 232 | 1968 | 7228: aldehyde dehydrogenase A/52257/5.20 | X | X | | |
| 233 | 1972 | 7233: chaperonin, 60 kDa/57 423/4.9 | X | X | X | + |
| 234 | 1982 | 7243: DNA polymerase I/103 184/5.21 | | X | | * |
| 235 | 1996 | 7259: phosphoribosylformylglycinamidine synthase/143 854/5.31 | X | X | | * |
| 236 | 2000 | 7264: conserved hypothetical protein/33468/4.77 | | X | | ** |
| 237 | 2039 | 7300: major outer membrane protein PIB/33 786/6.54 | X | X | X | |
| 238 | 2057 | 7319: 50S ribosomal protein L13/16212/9.72 | | | X | ** |
| 239 | 2079 | 7341: aspartate-semialdehyde dehydrogenase/39 858/5.40 | | X | | * |
| 240 | 2086 | 7348: GTP-binding protein/41 930/5.52 | | X | | * |
| 241 | 2091 | 7353: hemolysin, putative/21804/9.81 | | | X | + |
| 242 | 2096 | 7359: malate:quinone oxidoreductase/53 9687/5.51 | X | X | | + |
| 243 | 2101 | 7364: 30S ribosomal protein S2/26 899/9.04 | X | | | ** |
| 244 | 2102 | 7365: elongation factor TS (EF-TS)/30 330/5.30 | X | X | | ** |
| 245 | 2103 | 7366: uridylate kinase/25896/6.17 | | | X | * |
| 246 | 2129 | 7385: argininosuccinate synthase/49 664/5.18 | X | X | | * |
| 247 | 2138 | 7395: peptide chain release factor 2/41 487/5.18 | X | | | ** |
| 248 | 2154 | 7412: electron transfer flavoprotein, alpha subunit/32 579/4.99 | | X | | * |
| 249 | 2155 | 7413: electron transfer flavoprotein, beta subunit/26 948/6.08 | X | X | X | ** |
| 250 | 2159 | 7417: glyceraldehyde 3-phosphate dehydrogenase/35 845/5.40 | X | X | | * |

| | | | |
|---|---|---|---|
| TOTALS 7 | 156 | 194 | 87 |

### REFERENCES (The Contents of Which are Hereby Incorporated in Full)

[0272] [1] Tettelin et al. (2000) Science 287:1809-1815.
[0273] [2] Pizza et al. (2000) Science 287:1816-1820.
[0274] [3] Parkhill et al. (2000) Nature 404:502-506.
[0275] [4] Cole (2002) Eur Respir J Suppl. 36:78s-86s.
[0276] [5] McClelland et al. (2001) Nature 413:852-856.
[0277] [6] De Groot et al. (20001) Vaccine 19:4385-4395.
[0278] [7] Stephens (2000) J Infect Dis 181 Suppl 3:S521-523.
[0279] [8] Tettelin et al. (2001) Science 293:498-506.
[0280] [9] Weinstock et al. (2000) Res Microbiol 151:151-158.
[0281] [10] Wizemann et al. (2001) Infect Immun 69:1593-1598.
[0282] [11] Grifantini et al. (2002) Nat Biotechnol. 20:914-921.
[0283] [12] http://www.ncbi.nlm.nih.gov/entrez
[0284] [13] WO01/64922.
[0285] [14] WO01/64920.
[0286] [15] WO03/020756.
[0287] [16] Bjune et al. (1991) Lancet 338(8775):1093-1096.
[0288] [17] International patent application WO00/25811.
[0289] [18] International patent application WO01/52885.
[0290] [19] de Kleijn et al. (2001) Vaccine 20:352-358.
[0291] [20] U.S. Pat. No. 5,597,572.
[0292] [21] U.S. Pat. No. 5,747,653.
[0293] [22] European patent application 0680512.
[0294] [23] International patent application WO01/09350.
[0295] [24] International patent application WO02/09746.
[0296] [25] European patent 0449958
[0297] [26] International patent application WO01/91788.
[0298] [27] Gennaro (2000) Remington: The Science and Practice of Pharmacy. 20th edition, ISBN: 0683306472.
[0299] [28] Vaccine design: the subunit and adjuvant approach, eds. Powell & Newman, Plenum Press 1995 (ISBN 0-306-44867-X).
[0300] [29] WO90/14837.
[0301] [30] WO02/26212.
[0302] [31] WO98/33487.
[0303] [32] WO00/07621.
[0304] [33] WO99/27960.
[0305] [34] WO98/57659.
[0306] [35] European patent applications 0835318, 0735898 and 0761231.
[0307] [36] Krieg (2000) Vaccine 19:618-622; Krieg (2001) Curr opin Mol Ther 2001 3:15-24; WO96/02555, WO98/16247, WO98/18810, WO98/40100, WO98/55495, WO98/37919 and WO98/52581 etc.
[0308] [37] WO99/52549.
[0309] [38] WO01/21207.
[0310] [39] WO01/21152.
[0311] [40] WO00/62800.
[0312] [41] WO00/23105.
[0313] [42] WO99/11241.
[0314] [43] Del Giudice et al. (1998) Molecular Aspects of Medicine, vol. 19, number 1.
[0315] [44] Vaccine Design . . . (1995) eds. Powell & Newman. ISBN: 030644867X. Plenum.
[0316] [45] Johnson et al. (1999) Bioorg Med Chem Lett 9:2273-2278.
[0317] [46] Covacci & Rappuoli (2000) J. Exp. Med. 19:587-592.
[0318] [47] WO93/18150.
[0319] [48] Covacci et al. (1993) Proc. Natl. Acad. Sci. USA 90: 5791-5795.
[0320] [49] Tummuru et al. (1994) Infect. Immun. 61:1799-1809.
[0321] [50] Marchetti et al. (1998) Vaccine 16:33-37.
[0322] [51] Telford et al. (1994) J. Exp. Med. 179:1653-1658.
[0323] [52] Evans et al. (1995) Gene 153:123-127.
[0324] [53] WO96/01272 & WO96/01273, especially SEQ ID NO:6.
[0325] [54] WO97/25429.
[0326] [55] WO98/04702.
[0327] [56] Costantino et al. (1992) Vaccine 10:691-698.
[0328] [57] Costantino et al. (1999) Vaccine 17:1251-1263.
[0329] [58] International patent application WO03/0079.85.
[0330] [59] Watson (2000) Pediatr Infect Dis J 19:331-332.
[0331] [60] Rubin (2000) Pediatr Clin North Am 47:269-285, v.
[0332] [61] Jedrzejas (2001) Microbiol Mol Biol Rev 65:187-207.
[0333] [62] Bell (2000) Pediatr Infect Dis J 19:1187-1188.
[0334] [63] Iwarson (1995) APMIS 103:321-326.
[0335] [64] Gerlich et al. (1990) Vaccine 8 Suppl:S63-68 & 79-80.
[0336] [65] Gustafsson et al. (1996) N. Engl. J. Med. 334:349-355.
[0337] [66] Rappuoli et al. (1991) TIBTECH9:232-238.
[0338] [67] Vaccines (1988) eds. Plotkin & Mortimer. ISBN 0-7216-1946-0.
[0339] [68] Del Guidice et al. (1998) Molecular Aspects of Medicine 19:1-70.
[0340] [69] Hsu et al. (1999) Clin Liver Dis 3:901-915.
[0341] [70] International patent application WO99/24578.
[0342] [71] International patent application WO99/36544.
[0343] [72] International patent application WO99/57280.
[0344] [73] International patent application WO02/079243.
[0345] [74] International patent application WO02/02606.
[0346] [75] Kalman et al. (1999) Nature Genetics 21:385-389.
[0347] [76] Read et al. (2000) Nucleic Acids Res 28:1397-406.
[0348] [77] Shirai et al. (2000) J. Infect. Dis. 181(Suppl 3):S524-S527.
[0349] [78] International patent application WO99/27105.
[0350] [79] International patent application WO00/27994.
[0351] [80] International patent application WO00/37494.
[0352] [81] International patent application WO99/28475.
[0353] [82] Ross et al. (2001) Vaccine 19:4135-4142.
[0354] [83] Sutter et al (2000) Pediatr Clin North Am 47:287-308.
[0355] [84] Zimmerman & Spann (1999) Am Fam Physician 59:113-118, 125-126.
[0356] [85] Dreesen (1997) Vaccine 15 Suppl:S2-6.
[0357] [86] MMWR Morb Mortal Wkly Rep 1998 Jan 16;47(1):12, 19.
[0358] [87] Vaccines (1988) eds. Plotkin & Mortimer. ISBN 0-7216-1946-0.
[0359] [88] McMichael (2000) Vaccine 19 Suppl 1:S101-107.
[0360] [89] Schuchat (1999) Lancet 353(9146):51-6.
[0361] [90] International patent application WO02/34771.
[0362] [91] Dale (1999) Infect Dis Clin North Am 13:227-43, viii.
[0363] [92] Ferretti et al. (2001) PNAS USA 98: 4658-4663.
[0364] [93] Kuroda et al. (2001) Lancet 357(9264):1225-1240; see also pages 1218-1219.
[0365] [94] J Toxicol Clin Toxicol (2001) 39:85-100.
[0366] [95] Demicheli et al. (1998) Vaccine 16:880-884.
[0367] [96] Stepanov et al. (1996) J Biotechnol 44:155-160.
[0368] [97] Ingram (2001) Trends Neurosci 24:305-307.
[0369] [98] Rosenberg (2001) Nature 411:380-384.
[0370] [99] Moingeon (2001) Vaccine 19:1305-1326.
[0371] [100] EP-A-0372501
[0372] [101] EP-A-0378881
[0373] [102] EP-A-0427347
[0374] [103] WO93/17712
[0375] [104] WO94/03208
[0376] [105] WO98/58668
[0377] [106] EP-A-0471177
[0378] [107] WO00/56360
[0379] [108] WO91/01146
[0380] [109] WO00/61761
[0381] [110] WO01/72337
[0382] [111] Research Disclosure, 453077 (Jan 2002)
[0383] [112] Molloy et al. (2000) Eur J Biochem 267(10):2871-81
[0384] [113] Molloy et al. (2001) Electrophoresis 22(9):1686-96
[0385] [114] Phadke et al. (2001) Proteomics 1(5):705-20.
[0386] [115] Nouwens et al. (2000) Electrophoresis 21(17):3797-809.
[0387] [116] Chevallet et al. (1998) Electrophoresis 19(11):1901-9.
[0388] [117] Herbert et al. (1998) Electrophoresis 19(5):845-51.
[0389] [118] Doherty et al. (1998) Electrophoresis 19(2):355-63.
[0390] [119] Wilm et al. (1996) Nature 379(6564):466-9.
[0391] [120] WO99/24578.
[0392] [121] WO99/36544.
[0393] [122] WO99/57280.
[0394] [123] Nakai & Kanehisa Proteins 11(2):95-1 10
[0395] [124] Nakai (2000) Adv Protein Chem 54:277-344.
[0396] [125] WO01/38350

The application's sequence listing, which the Patent Office published only in electronic form, follows.

SEQUENCE LISTING (217 sequences)

SEQ ID NO: 1 - protein, 403 aa, Neisseria meningitidis
MAFLKLTEQNVQGKTVLIRADMNVPFKDGKISDDTRIRASLASIKYCVDNGASVIVMTHLGRPTEGEFHPEDDVAPVAAHLGSLLGKDVKVLNDWRENKPALNAGDVVMLQNVRINKGEKKNDLELGKAYASLCDVFVNDAFGTAHRAQASTEAVAQAAPVACAGVLMAGELDALGKALKQPARPMVAIVAGSKVSTKLTILESLADKVDQLIVGGGIANTFLLAEGKAIGKSLAEHDLVEESKKIMAKMAAKGGSVPLPTDVVVAKAFAADAEAVVKDIAADAEAVVKDIADVAEDEMILDIGPKSAAALADLLKAAGTVVWNGPVGVFEFDQFAGGTKALAEAIAQSKAFSIAGGGDTLAAIAKFGVTEQIGYISTGGGAFLEFLEGKELPAVAALEKRGA

SEQ ID NO: 2 - protein, 170 aa, Neisseria meningitidis
MNTLQKGFTLIELMIVIAIVGILAAVALPAYQDYTARAQVSEAILLAEGQKSAVTEYYLNHGEWPGNNTSAGVATSSEIKGKYVKSVEVKNGVVTAQMASSNVNNEIKGKKLSLWAKRQNGSVKWFCGQPVTRDKAKAANDDVTAAAAANGKKIDTKHLPSTCRDASDAS

SEQ ID NO: 3 - protein, 685 aa, Neisseria meningitidis
MTRKILVTSALPYANGSIHLGHMVEHIQTDVWVRFQKLRGHACHYCCADDTHGTPVMLAAQKQGIAPEDMIAKVREEHLADFTGFFIGYDNYYSTHSPENKQFSQDIYRALKANGKIESRVIEQLFDPEKQMFLPDRFVKGECPKCHAQDQYGDNCEVCGTTYSPTELINPYSAVSGTKPELRESEHFFFKLGECADFLKAWTSGNNPHDGKPHLQAEALNKMKEWLGEGEETTLSDWDISRDAPYFGFEIPDAPGKYFYVWLDAPVGYMASFKNLCDRIGVDFDEYFKADSQTEMYHFIGKDILYFHALFWPAMLHFSGHRAPTGVYAHGFLTVDGQKMSKSRGTFITAKSYLEQGLNPEWMRYYIAAKLNSKIEDIDLNLQDFISRVNSDLVGKYVNIAARASGFIAKRFEGRLKDVADSELLAKLTAQSEAIAECYESREYAKALRDIMALADIVNEYVDANKPWELAKQEGQDERLHEVCSELINAFTMLTAYLAPVLPQTAANAAKFLNLEAITWANTRDTLGKHAINKYEHLMQRVEQKQVDDLIEANKQSIAAAAAPAAEEGKYEKVAEQASFDDFMKIDMRVAKVLNCEAVEGSTKLLKFDLDFGFEKRIIFSGIAASYPNPAELNGRMVIAVANFAPRKMAKFGVSEGMILSAATADGKLKLLDVDTGAQPGDKVG

SEQ ID NO: 4 - protein, 456 aa, Neisseria meningitidis
MPQNTLNIVILAAGKGTRMYSKMPKVLHRIGGKPMVGRVIDTAAALNPQNICVVIGHGKEQVLDTVKRDVVWVEQTEQLGTGHAVKTALPHLSAEGRTLVLYGDVPLIDVETLETLLEAAGNEVGLLTDVPNDPTGLGRIIRDSNGSVTAIVEEKDADAVQKAVKEINTGILVLPNAKLENWLNSLSSNNAQGEYYLTDLIAKAVADGIKVHPVQVRASHLAAGVNNKLQLTELERIFQTEQAQELLKAGVTLRDPARFDLRGRLKHGQDVVIDVNCIFEGDIELGDNVEIGANCVIKNAKIGANSKIAPFSHLESCEVGENNRIGPYARLRPQARLADDVHVGNFVEIKNAAIGKGTKANHLTYIGDAEVGCKTNFGAGTIIANYDGVHKHKTVIGDEVRIGSNCVLVAPVTLGNKVTTGAGSTITRNVEDNKLALARARQTVIEGWVRPEKDKQ

SEQ ID NO: 5 - protein, 421 aa, Neisseria meningitidis
MFSFFRRKKKQETPALEEAQIQETAAKAESELAQIVENIKEDAESLAESVKGQVESAVETVSGAVEQVKETVAEMLSEAEEAAEKAAEQVEAAKEAVAETVGEAVGQVQEAVATTEEHKLGWAARLKQGLTKSRDKMAKSLAGVFGGGQIDEDLYEELETVLITSDMGMEATEYLMKDVRDRVSLKGLKDGNELRGALKEALYDLIKPLEKPLVLPETKEPFVIMLAGINGAGKTTSIGKLAKYFQAQGKSVLLAAGDTFRAAAREQLQAWGERNNVTVISQTTGDSAAVCFDAVQAAKARGIDIVLADTAGRLPTQLHLMEEIKKVKRVLQKAMPDAPHEIIVVLDANIGQNAVNQVKAFDDALGLTGLIVTKLDGTAKGGILAALASDRPVPVRYIGVGEGIDDLRPFDARAFVDALLD

SEQ ID NO: 6 - protein, 408 aa, Neisseria meningitidis
MNTDNLHDILDEMVQVYSQKKQSRSETPAEIGAHFHPLLDRLCETAEAQNASDILISKGFPPSLKINSALTPQPQKALTGEETAAIAASTMNAEQSEIFRRDGEINYSVQSRSGTRYRANAYHSQGSAGLVLRRINHVIPQMQELGLPEKLKDLAVAPRGLLIIVGPTGSGKSTTMATMLEHRNKTLPSHIVTIEDPIEFIYKPRRCIFTQREIGVDTINWQTAVQNAMRQSPDVVCIGEVRSRESMEYAMQLAQTGHLCIFTLHANTAPQSLERILNFYPKEQHNQILIDIALNLTGIICQRLALKQDKTGRTAVVDLLINTPAIQDFILKGDLMNISKIMETAKTDGMQTMDQNLFELYRHGIISYEEALRQSVSANNLRLHIQLHKEGKTPELLYDRVNGLNLIS

SEQ ID NO: 7 - protein, 347 aa, Neisseria meningitidis
MQITDLLAFGAKNKASDLHLSSGISPMIRVHGDMRRINLPEMSAEEVGNMVTSVMNDHQRKIYQQNLEVDFSFELPNVARFRVNAFNIGRGPAAVFRTIPSTVLSLEELKAPSIFQKIAESPRGMVLVTGPTGSGKSTTLAAMINYINETQPAHILTIEDPIEFVHQSKKSLINQRELHQHTLSFANALRSALREDPDVILVGEMRDPETIGLALTAAETGHLVFGTLHTTGAAKTVDRIVDVFPAGEKEMVRSMLSESLTAVISQNLLKTHDGNGRVASHEILIANPAVRNLIRENKITQINSVLQTGQASGMQTMDQSLQSLVRQGLIAPEVARRRAQNSESMSF

SEQ ID NO: 8 - protein, 349 aa, Neisseria meningitidis
MQNNNEFKIGNRSVGYNHEPLIICEIGINHEGSLKTAFEMVDAAYNAGAEVVKHQTHIVEDEMSDEAKQVIPGNADVSIYEIMERCALNEEDEIKLKEYVESKGMIFISTPFSRAAALRLQRMDIPAYKIGSGECNNYPLIKLVASFGKPIILSTGMNSIESIKKSVEIIREAGVPYALLHCTNIYPTPYEDVRLGGMNDLSEAFPDAIIGLSDHTLDNYACLGAVALGGSILERHFTDRMDRPGPDIVCSMNPDTFKELKQGAHALKLARGGKKDTIIAGEKPTKDFAFASVVADKDIKKGELLSGDNLWVKRPGNGDFSVNEYETLFGKVAACNIRKGAQIKKTDIE

SEQ ID NO: 9 - protein, 490 aa, Neisseria meningitidis
MNQTSRDLTRISHNTKIVATLGPGSNNVELLEDMIRVGGLNVVRFNFSHGTPEFHQENALIVREAAKRAGQEIAIIADLQGPKIRVGKIAGGGIELNKGETLVLDAALEGEGTREAVGLDYRDLPDDVAAGDVLWLDDGLLTLTVESVEGSRIITRVENSHVLKSNKGINKRGGGLSAGALTEKDFRDLKTAIAIGCDYLAISFVKSAEDLHIARAKVEEEMKGSTAVRPGLVSKIERVEAIENLDEIILAGDGIMVARGDLAVEVGHAAVPALQKRMIRRARELRRFSITATQMMESMITNPVPTRAEVSDVANAVLDGTDAVMCSAETAVGAYPFETVSQMAIICAAAEKEQDSLNGVAEQVEYPEAVSTNLAVAGGAVSVARAVHAKAIVALTESGSTAFEISRHNITLPIFALTPSVSAQRRMAMYRGVRPLILATSTDHDTALNEVETMLVEHNILHSGDQYIITSGSQMRESGSTNTLEVLRVK

SEQ ID NO: 10 - protein, 443 aa, Neisseria meningitidis
MLKCGTFFITRHIPRGCRRFFQPNQARQTEIYQIRGTVMQRRIITLLCAAGMAFSTQTLAANLEVRPNAPERYTVKQGDTLWGISGKYLYSPWQWGRLWDANRDQIHNPDLIYPDQVLVLRHVDGEPRLGLEQTDGIPVVKMSPDKEVSGYGIPAIDVNFYRIFMRHPQIVSRKETAAAPRLLSGPEGRLLYTKGTRVYTKGLKEPGRYLTYRINKNITDPDTGKFLGQEVAFSGIVRSLDYTDSVLEQRSKQAGERPKDNEYHTRTHPLITPLRTPSIQPLVVETAISEIQQGDYLMKMPEDTDRFNMMPHEPSRPVQAKIVSVFEGTRIAGQFQTITIDKGEADGLDKGTVLSLYKRKKTMQVDLSNNFKSRDTVELISTPAEEVGLAMVYRTSEHLSSAIILENISDISVGDTAANPGRDLDNIPDQGRSRVKFGFNRSE

SEQ ID NO: 11 - protein, 425 aa, Neisseria meningitidis
MRSSDILIVDDEIGIRDLLSEILQDEGYSVALAENAEEARKLRHQARPAMVLLDIWMPDCDGITLLKEWAKNGQLNMPVVMMSGHASIDTAVEATKIGAIDFLEKPISLQKLLSAVENALKYGAAQTETGPVFDKLGNSAAIQEMNREVGAAVKCASPVLLTGEAGSPFETVARYFHKNGTPWVSPARVEYLIDMPMELLQKAEGGVLYVGDIAQYSRNIQAGIAFIVGKAEHRRVRVVASGSRAAGSDGIACEEKLAELLSESVVRIPPLRMQHEDIPFLIQGIACNVAESQKIAPASFSEEALAALTRYDWPGNFDQLQSVVATLLLEADGQEIGAGAVSSLLGQNVPAEGAEDMVGGFNFNLPLRELREEVERRYFEYHIAQEGQNMSQVAQKVGLERTHLYRKLKQLGIGVSRRAGEKTEE

SEQ ID NO: 12 - protein, 394 aa, Neisseria meningitidis
MAKEKFERSKPHVNVGTIGHVDHGKTTLTAALTTILAKKFGGAAKAYDQIDNAPEEKARGITINTSHVEYETETRHYAHVDCPGHADYVKNMITGAAQMDGAILVCSAADGPMPQTREHILLARQVGVPYIIVFMNKCDMVDDAELLELVEMEIRDLLSSYDFPGDDCPIVQGSALKALEGDAAYEEKIFELAAALDSYIPTPERAVDKPFLLPIEDVFSISGRGTVVTGRVERGIIHVGDEIEIVGLKETQKTTCTGVEMFRKLLDEGQAGDNVGVLLRGTKREDVERGQVLAKPGTITPHTKFKAEVYVLSKEEGGRHTPFFANYRPQFYFRTTDVTGAVTLEEGVEMVMPGENVTITVELIAPIAMEEGLRFAIREGGRTVGAGVVSSVIA

SEQ ID NO: 13 - protein, 178 aa, Neisseria meningitidis
MSKKWYVVQAYSGFEKNVQRILEERIAREEMGDYFGQILVPVEKVVDIRNGRKTISERKSYPGYVLVEMEMTDDSWHLVKSTPRVSGFIGGRANRPTPISQREAEIILQQVQTGIEKPKPKVEFEVGQQVRVNEGPFADFNGVVEEVNYERNKLRVSVQIFGRETPVELEFSQVEKIN

SEQ ID NO: 14 - protein, 231 aa, Neisseria meningitidis
MAKVSKRLKALRSSVEANKLYAIDEAIALVKKAATAKFDESVDVSFNLGVDPRKSDQVIRGSVVLPKGTGKITRVAVFTQGANAEAAKEAGADIVGFEDLAAEIKAGNLNFDVVIASPDAMRIVGQLGTILGPRGLMPNPKVGTVTPNVAEAVKNAKAGQVQYRTDKAGIVHATIGRASFAEADLKENFDALLDAIVKAKPAAAKGQYLKKVAVSSTMGLGIRVDTSSVNN

SEQ ID NO: 15 - protein, 166 aa, Neisseria meningitidis
MSLNIETKKVAVEEISAAIANAQTLVVAEYRGISVSSMTELRANARKEGVYLRVLKNTLARRAVQGTSFAELADQMVGPLVYAASEDAVAAAKVLHQFAKKDDKIVVKAGSYNGEVMNAAQVAELASIPSREELLSKLLFVMQAPVSGFARGLAALAEKKAGEEAA

SEQ ID NO: 16 - protein, 123 aa, Neisseria meningitidis
MAITKEDILEAVGSLTVMELNDLVKAFEEKFGVSAAAVAVAGPAGAGAADAEEKTEFDVVLASAGDQKVGVIKVVRAITGLGLKEAKDIVDGAPKTIKEGVSKAEAEDIQKQLEEAGAKVEIK

SEQ ID NO: 17 - protein, 1394 aa, Neisseria meningitidis
MCMNYSFTEKKRIRKSFAKRENVLEVPFLLATQIDSYAKFLQLENAFDKRTDDGLQAAFNSIFPIVSHNGYARLEFVHYTLGEPLFDIPECQLRGITYAAPLRARIRLVILDKEASKPTVKEVRENEVYMGEIPLMTPSGSFVINGTERVIVSQLHRSPGVFFEHDKGKTHSSGKLLFSARIIPYRGSWLDFEFDPKDLLYFRIDRRRKMPVTILLKALGYNNEQILDIFYDKETFYLSSNGVQTDLVADRLKGETAKVDILDKEGNVLVAKGKRITAKNIRDITNAGLTRLDVEPESLLGKALAADLIDSETGEVLASANDEITEELLAKFDINGVKEITTLYINELDQGAYISNTLRTDETAGRQAARVAIYRMMRPGEPPTEEAVEQLFNRLFFSEDSYDLSRVGRMKFNTRTYEQKLSEAQQNSWYGRLLNETFAGAADKGGYVLSVEDIVASIATLVELRNGHGEVDDIDHLGNRRVRSVGELTENQFRSGLARVERAVKERLNQAESENLMPHDLINAKPVSAAIKEFFGSSQLSQFMDQTNPLSEVTHKRRVSALGPGGLTRERAGFEVRDVHPTHYGRVCPIETPEGPNIGLINSLSVYARTNDYGFLETPYRRVIDGKVTEEIDYLSAIEEGRYVIAQANADLDSDGNLIGDLVTCREKGETIMATPDRVQYMDVATGQVVSVAASLIPFLEHDDANRALMGANMQRQAVPCLRPEKPMVGTGIERSVAVDSATAIVARRGGVVEYVDANRVVIRVHDDEATAGEVGVDIYNLVKFTRSNQSTNINQRPAVKAGDVLQRGDLVADGASTDFGELALGQNMTIAFMPWNGYNYEDSILISEKVAADDRYTSIHIEELNVVARDTKLGAEDITRDIPNLSERMQNRLDESGIVYIGAEVEAGDVLVGKVTPKGETQLTPEEKLLRAIFGEKASDVKDTSLRMPTGMSGTVIDVQVFTREGIQRDKRAQSIIDSELKRYRLDLNDQLRIFDNDAFDRIERMIVGQKANGGPMKLAKGSEITTEYLAGLPSRHDWFDIRLTDEDLAKQLELIKVSLQQKREEADELYEIKKKKLTQGDELQPGVQKMVKVFIAIKRRLQAGDKMAGRHGNKGVVSRILPVEDMPYMADGRPVDIVLNPLGVPSRMNIGQILEVHLGWAAKGIGERIDRMLKEQRKAGELREFLNRLYNGSGKKEDLDALTDEEIIELASNLRKGASFASPVFDGAKESEIREMLNLAYPSDDPEVEKLGFNDSKTQITLYDGRSGEAFDRKVTVGVMHYLKLHHLVDEKMHARSTGPYSLVTQQPLGGKAQFGGQRFGEMEVWALEAYGAAYTLQEMLTVKSDDVNGRTKMYENIVKGEHKIDAGMPESFNVLVKEIRSLGLDIDLERY

SEQ ID NO: 18 - protein, 1391 aa, Neisseria meningitidis
MNLLNLFNPLQTAGMEEEFDAIKIGIASPETIRSWSYGEVKKPETINYRTFKPERDGLFCAKIFGPVKDYECLCGKYKRLKFKGVTCEKCGVEVTLSKVRRERMGHIELAAPVAHIWFLKSLPSRLGMVLDMTLRDIERVLYFEAFVVTDPGMTPLQRRQLLTEDDYYNKLDEYGDDFDAKMGAEGIRELLRTLNVAGEIEILRQELESTGSDTKIKKIAKRLKVLEAFHRSGMKLEWMIMDVLPVLPPDLRPLVPLDGGRFATSDLNDLYRRVINRNNRLKRLLELHAPDIIVRNEKRMLQEAVDSLLDNGRRGKAMTGANKRPLKSLADMIKGKGGRFRQNLLGKRVDYSGRSVITVGPYLRLHQCGLPKKMALELFKPFIFHKLEKQGLASTVKAAKKLVEQEVPEVWDILEEVIREHPIMLNRAPTLHRLGIQAFEPILIEGKAIQLHPLVCAAFNADFDGDQMAVHVPLSLEAQMEARTLMLASNNVLSPANGEPIIVPSQDIVLGLYYMTRDRINAKGEGSLFADVKEVHRAYHTKQVELGTKITVRLREWVKNEAGEFEPVVNRYETTVGRALLSEILPKGLPFEYVNKALKKKEISKLINASFRLCGLRDTVIFADHLMYTGFGFAAKGGISIAVDDMEIPKEKAALLAEANAEVKEIEDQYRQGLVTNGERYNKVVDIWGRAGDKIAKAMMDNLSKQKVIDRAGNEVDQESFNSIYMMADSGARGSAAQIKQLSGMRGLMAKPDGSIIETPITSNFREGLTVLQYFIATHGARKGLADTALKTANSGYLTRRLVDVTQDLVVVEDDCGTSDGFVMKAVVQGGDVIEALRDRILGRVTASDVVDPSSGETLVEAGTLLTEKLVDMIDQSGVDEVKVRTPITCKTRHGLCAHCYGRDLARGKLVNAGEAVGVIAAQSIGEPGTQLTMRTFHIGGAASRAAAASQVEAKSNGTARFSSQMRYVANNKGELVVIGRSCEVVIHDDIGRERERHKVPYGAILLVQDGMAIKAGQTLATWDPHTRPMITEHAGMVKFENVEEGVTVAKQTDDVTGLSTLVVIDGKRRSSSASKLLRPTVKLLDENGVEICIPGTSTPVSMAFPVGAVITVREGQEIGKGDVLARIPQASSKTRDITGGLPRVAELFEARVPKDAGMLAEITGTVSFGKETKGKQRLIVTDVDGVAYETLISKEKQILVHDGQVVNRGETIVDGAVDPHDILRLQGIEALARYIVQEVQEVYRLQGVKISDKHIEVIIRQMLRRVNIADAGETGFITGEQVERGDVMAANEKALEEGKEPARYENVLLGITKASLSTDSFISAASFQETTRVLTEAAIMGKQDELRGLKENVIVGRLIPAGTGLTYHRSRHQQWQEVEQETAETQVTDE

SEQ ID NO: 19 - protein, 156 aa, Neisseria meningitidis
MPRRREVPKRDVLPDPKFGSVELTKFMNVLMIDGKKSVAERIVYGALEQIEKKTGKVAIEVFNEAIANAKPIVEVKSRRVGGANYQVPVEVRPSRRLALAMRWVRDAARKRGEKSMDLRLAGELIDASEGRGGALKKREEVHRMAEANKAFSHFRF

SEQ ID NO: 20 - protein, 701 aa, Neisseria meningitidis
MARKTPISLYRNIGISAHIDAGKTTTTERILFYTGLTHKLGEVHDGAATTDYMEQEQERGITITSAAVTSYWSGMAKQFPEHRFNIIDTPGHVDFTVEVERSMRVLDGAVMVYCAVGGVQPQSETVWRQANKYQVPRLAFVNKMDRQGANFFRVVEQMKTRLRANPVPIVIPVGAEDNFSGVVDLLKMKSIIWNEVDKGTTFTYGDIPAELVETAEEWRQNMIEAAAEASEELMDKYLGGDELTEEEIVGALRQRTLAGEIQPMLCGSAFKNKGVQRMLDAVVELLPAPTDIPPVQGVNPNTEEADSRQASDEEKFSALAFKMLNDKYVGQLTFIRVYSGVVKSGDTVLNSVKGTRERIGRLVQMTAADRTEIEEVRAGDIAAAIGLKDVTTGETLCAESAPIILERMEFPEPVIHIAVEPKTKADQEKMGIALNRLAKEDPSFRVRTDEESGQTIISGMGELHLEIIVDRMKREFGVEANIGAPQVAYRETIRKAVKAEYKHAKQSGGKGQYGHVVIEMEPMEPGGEGYEFIDEIKGGVIPREFIPSVDKGIRDTLPNGIVAGYPVVDVRIRLVFGSYHDVDSSQLAFELAASQAFKEGMRQASPALLEPIMAVEVETPEEYMGDVMGDLNRRRGVVLGMDDDGIGGKKVRAEVPLAEMFGYSTDLRSATQGRATYSMEFKKYSEAPAHIAAAVTEARKG

SEQ ID NO: 21 - protein, 103 aa, Neisseria meningitidis
MANQKIRIRLKAYDYALIDRSAQEIVETAKRTGAVVKGPIPLPTKIERFNILRSPHVNKTSREQLEIRTHLRLMDIVDWTDKTTDALMKLDLPAGVDVEIKVQ

SEQ ID NO: 22 - protein, 214 aa, Neisseria meningitidis
MTLGLVGRKVGMTRVFDEQGVSVPVTVLDMSANRVTQVKSKDTDGYTAVQVTFGQKKANRVNKAEAGHFAKAGVEAGRGLIEFALTEEKLAELKAGDEITVSMFEVGQLVDVTGTSKGKGFSGTIKRHNFGAQRTSHGNSRSHRVPGSIGMAQDPGRVFPGKRMAGQYGNTKATVQKLEVVRVDAERQLLLVKGAVPGAVNSDVVVRPSVKVGA

SEQ ID NO: 23 - protein, 206 aa, Neisseria meningitidis
MELKVIDAKGQVSGSLSVSDALFAREYNEALVHQLVNAYLANARSGNRAQKTRAEVKHSTKKPWRQKGTGRARSGMTSSPLWRKGGRAFPNKPDENFTQKVNRKMYRAGMATILSQLTRDERLFAIEALTAETPKTKVFAEQVKNLGLEQVLFVTKQLDENVYLASRNLPNVLVLEAQQVDPYSLLRYKKVIITKDAVAQLEEQWV

SEQ ID NO: 24 - protein, 104 aa, Neisseria meningitidis
MNQQRLTQVILAPIVSEKSNVLAEKRNQMTFKVLANATKPEIKAAVELLFGVQVADVTTVTIKGKVKRFGRTLGRRSDVKKAYVSLAAGQELDLEAAAAAADKE

SEQ ID NO: 25 - protein, 179 aa, Neisseria meningitidis
MARLREFYKETVVPELVKQFGYKSVMEVPRIEKITLNMGVGEAVADKKVMEHAVSDLEKIAGQKPVVTVARKSIAGFKIRDNYPVGCKVTLRRDQMFEFLDRLITIALPRVRDFRGVSGKSFDGRGNYNMGVREQIIFPEIEYDKIDALRGLNITITTTAKTDEEAKALLSLFKFPFKG

SEQ ID NO: 26 - protein, 130 aa, Neisseria meningitidis
MSMHDPISDMLTRIRNAQRANKAAVAMPSSKLKCAIAKVLKEEGYIEDFAVSSDVKSILEIQLKYYAGRPVIEQIKRVSRPGLRIYKASSEIPSVMNGLGIAIVSTSKGVMTDRKARSQGVGGELLCIVA

SEQ ID NO: 27 - protein, 177 aa, Neisseria meningitidis
MSRVAKNPVTVPAGVEVKFGAEALVIKGKNGELSFPLHSDVAIEFNDGKLTFVANNSSKQANAMSGTARALVSNMVKGVSEGFEKRLQLIGVGYRAQAQGKILNLSLGFSHPIVYEMPEGVSVQTPSQTEIVLTGSDKQVVGQVAAEIRAFRAPEPYKGKGVRYVGEVVVMKEAKKK

SEQ ID NO: 28 - protein, 172 aa, Neisseria meningitidis
MAKHEIEERGDGLIEKMVAVNRVTKVVKGGRIMAFSALTVVGDGDGRIGMGKGKSKEVPVAVQKAMDQARRSMIKVPLKNGTIHHEVIGRHGATKVFMQPAKEGSGVKAGGPMRLVFDAMGIHNISAKVHGSTNPYNIVRATLDGLSKLHTPADIAAKRGLTVEDILGVNHG

SEQ ID NO: 29 - protein, 328 aa, Neisseria meningitidis
MQNSTTEFLKPRQIDVNTFSATRAKVSMQPFERGFGHTLGNALRRILLSSMNGFAPTEVAIAGVLHEYSTVDGIQEDVVDILLNIKGIVFKLHGRSQVQLVLKKSGSGVVSAGDIELPHDVEILNPGHVICHLADNGQIEMEIKVEQGRGYQSVSGRQVVRDENRQIGAIQLDASFSPISRVSFEVEPARVEQRTDLDKLVLDIETDGSIDPEEAVRSAARILIDQMSIFADLQGTPVEEVEEKAPPIDPVLLRPVDDLELTVRSANCLKAEDIYYIGDLIQRTETELLKTPNLGRKSLNEIKEVLASKGLTLGSKLEAWPPVGLEKP

SEQ ID NO: 30 - protein, 271 aa, Neisseria meningitidis
MAKIIVVTSGKGGVGKTTTSASIATGLALRGYKTAVIDFDVGLRNLDLIMGCERRVVYDLINVIQGEATLNQALIKDKNCENLFILPASQTRDKDALTREGVEKVMQELSGKKMGFEYIICDSPAGIEQGALMALYFADEAIVTTNPEVSSVRDSDRILGILQSKSHKAEQGGSVKEHLLITRYSPERVAKGEMLSVQDICDILHIPLLGVIPESQNVLQASNSGEPVIHQDSVAASEAYKDVIARLLGENREMRFLEAEKKSFFKRLFGG

SEQ ID NO: 31 - protein, 306 aa, Neisseria meningitidis
MTLTELRYIVAVAQERHFGRAARRCFVSQPTLSIAIKKLEEELAVSLFDRSSNDIITTEAGERIVAQARKVLEEAELIRHLANEEQNELEGAFKLGLIFTVAPYLLPKLIVSLRRTAPKMPLMLEENYTHTLTESLKRGDVDAIIVAEPFQEPGIVTEPLYDEPFFVIVPKGHSFEELDAVSPRMLGEEQVLLLTEGNCMRDQVLSSCSELAAKQRIQGLTNTLQGSSINTIRHMVASGLAISVLPATALTENDHMLFSIIPFEGTPPSRRVVLAYRRNFVRPKALSAMKAAIMQSQLHGVSFICD

SEQ ID NO: 32 - protein, 631 aa, Neisseria meningitidis
MTHMIYPKTYDVIVVGGGHAGTEAALAAARMGAQTLLLSHNIETLGQMSCNPSIGGIGKGHLVRELDALGGAMALATDKSGIQFRRLNASKGAAVRATRAQADRILYKAAIREMLENQENLDLFQQAVEDVTLDGERISGVITAMGVEFKARAVVLTAGTFLSGKIHIGLENYEGGRAGDPAAKSLGGRLRELKLPQGRLKTGTPPRIDGRTIDFSQLTEQPGDTPVPVMSVRGNADMHPRQVSCWITHTNTQTHDIIRSGFDRSPMFTGKIEGVGPRYCPSIEDKINRFADKDSHQIFLEPEGLTTHEYYPNGISTSLPFDIQIALVRSMKGLENAHILRPGYAIEYDYFDPRNLKASLETKTIAGLFFAGQINGTTGYEEAAAQGLLAGANAVQYVRGQDPLLLRREQAYLGVLVDDLITKGVNEPYRMFTSRAEYRLQLREDNADMRLTEDGYKIGLVSEAQWRMFNEKREAVEREIQRLKTTWYTPQKLAEGEQIRVFGQKLSREANLHDLLRRPNLDYAALMTLEGAMPSENLSAEVIEQVEIQVKYQGYIDRQNEEIDSRRDIETLKLPDGIDYGKVKGLSAEVQQKLNQHKPETVGQASRISGVTPAAVALLMVHLKRGFKDAK

SEQ ID NO: 33 - protein, 919 aa, Neisseria meningitidis
MKRMLFNATQAEELRVAIVDGQNLLDLDIETLGKEQRKGNIYKGIITRIEPSLEACFVDYGTDRHGFLPFKEVSRSYFQDYEGGRARIQDVLKEGMEVIVQVEKDERGNKGAALTTFISLAGRYLVLMPNNPRGGGVSRRIEGEERQELKAAMAELDIPNGMSIIARTAGIGRSAEELEWDLNYLKQLWQAIEEAGKAHHDPYLLFMESSLLIRAIRDYFRPDIGEILVDNQEVYDQVAEFMSYVMPGNIGRLKLYEDHTPLFSRFQIEHQIESAFSRSVSLPSGGAIVIDHTEALVSIDVNSARATRGADIEDTAFKTNMEAAEEVARQMRLRDLGGLVVIDFIDMENPKHQRDVENVLRDALKKDRARVQMGKLSRFGLLELSRQRLKPALGESSHVACPRCAGTGVIRGIESTALHVLRIIQEEAMKDNTGEVRAQVPVDVATFLLNEKRAELFAMEERLDVNVVLIPNIHLENPHYEINRIRTDDVEEDGEPSYKRVAEPEEDESAKPFGGEKAKAARPEPAVKGVRHTSPAPTAAPEKKTSWWDSFKAWLKRIFGGSETQAAPAAETSEKRSTANRSGSRANNRRQNPRRSKREGSKVEVREVAGKTAGQEARADKAETRNNGNRRRNERGDRAAERANEAEIQSRNVQPAATVADAAPSETEVQTGKRRRNGSRSERGQTAPETATVAETTVQTAENTPSEPHTAEDKGSKPKSERNRRERDSRDAKERRERNNQRDRRQNGKKRNIPSAAKIEQYLNIHDTADKVRSAAAHVFGETDANAPITVSIADPVAERDLPTASPAVSNGDAPVYDAAEKIRRATAAILPEGATPKAEAQEMPSETATFTAAAEQARETAQTGGLVLIETDPAALKAWAAQPEVQAGRGLRRSEQPKPSEVATVPAEEMIQVETRQG

SEQ ID NO: 34 - protein, 796 aa, Neisseria meningitidis
MTEQKHEEYGADSIQVLEGLEAVRKRPGMYIGDTQDGSGLHHMVFEVLDNAIDEALAGHCDKITVTIHADHSVSVADNGRGMPTGIHPKEGRSAAEVIMTVLHAGGKFDNNSYKISGGLHGVGVSVVNALSDWVTLTIYRDGKEHFVRFVRGETEEPLKIVGDSDKKGTTVRFLASTETFGNVEYSFDILAKRIRELSFLNNGVDIELTDERDGKHESFALSGGVAGFVQYMNRKKTPLHEKIFYAFGEKDGMSVECAMQWNDSYQESVQCFTNNIPQRDGGTHLTALRQVMTRTINNYIEANEVAKKAKVETAGDDMREGLTCVLSVKLPDPKFSSQTKDKLVSGEIGPVVNEVISQALTDFLEENPNEAKIITGKIVDAARAREAARKAREITRRKGVMDGLGLPGKLADCQEKDPALSELYLVEGDSAGGSAMQGRDRKFQAILPLKGKILNVEKARFEKMLASQEVATLITALGAGIGKEEFNAEKLRYHRIIIMTDADVDGAHIRTLLLTFFYRQMPELVERGYIYIAQPPLYKAKYGKQERYLKDELEKDQWLLGLALEKAKIISDGRTIEGAELADTAKQFLLAKTVIEQESRFVDELVLRAMLHASPIDLTSSENADKAVAELSGLLDEKEVALERIEGHEGHRFIKITRKLHGNVMVSYIEPKFLNSKAYQTLTQTAAALKGMVGEGAKLYKGENGYDADSFETALDILMSVAQKGMSIQRYKGLGEMNPEQLWETTMDPAVRRLLKVRIEDAIAADEVFVTLMGDEVEPRRAFIENNALIAQNIDA

SEQ ID NO: 35 - protein, 415 aa, Neisseria meningitidis
MSQRRVVITGLGQVSPVGNTVAEAWDTLLTGKSGIGAITRFDTSDINSRVAGEVRGFDIGQYISAKEARRMDVFIHYGIAAALQAIADSGLDDVENLDKDRIGVNIGSGIGGLPGIEVTGKAVIEGGARKINPFFIPGSLINLISGHVTILKGYRGPSYGMVSACTTGAHAIGDSLRMIKYGDADIMVAGGAEGAISTLGVGGFAAMKALSTRNDDPATASRPWDKGRDGFVIGEGAGILVLEELEHAKKRGAKIYAEIVGFGMSSDAYHITAPNEEGPALAVTRALKDAGINPEDVDYVNAHGTSTPLGDANETKALKRAFGEHAYKTVVSSTKSMTGHLLGAAGGVEAVYSILAIHDGKIPPTINIFEQDVEAGCDLDYCANEARDAEIDVAISNSFGFGGTNGTLVFKRFKG

SEQ ID NO: 36 - protein, 433 aa, Neisseria meningitidis
MAIYQSGVIFDQVDTANPDCWTLDEYVKRGGYTALRKILSENISQTDVIDEVKTSGLRGRGGAGFPTGLKWSFMPRSFPGEKYVVCNTDEGEPGTFKDRDIIMFNPHALIEGMIIAGYAMGAKAGYNYIHGEIFEGYQRFEAALEQARAAGFLGKNILGSDFEFELFAHHGYGAYICGEETALLESLEGKKGQPRFKPPFPASFGLYGKPTTINNTETFSSVPFIIRDGGQAFADKGIPNAGGTKLFCISGHVERPGNYEVPLGTPFAEVLKMAGGMRGGKKLKAVIPGGSSAPVLPADIMMQTNMDYDSISKAGSMLGSGAIIVMDEDVCMVKALERLSYFYYDESCGQCTPCREGTGWLYRIVHRIVEGKGKMEDLDLLDSVGNQMAGRTICALADAAVFPVRSFTKHFRDEFVHYIEHGGPMKEHKWGGW

SEQ ID NO: 37 - protein, 204 aa, Neisseria meningitidis
MNFTRLLNQVLSTVQKKGNTFSDSPLNSFGGGALVAGVASMLLNGKNRKTITKIGSTAALGYLAYRGYQMWQQNKGRATVTQSDFQPAGETEETYSRTVLRTMIAAAASDGMIDEAERRTIEQESGTDPETAAWLAAEYRLPASIEDIAAAVGNDEALAAEAYLAARLVCADLSRKETVFLARLSQALKLDDNLVESLERQLGF

SEQ ID NO: 38 - protein, 231 aa, Neisseria meningitidis
MKLKTLALTSLTLLALAACSKQAETSVPADSAQSSSSAPAAPAELNEGVNYTVLSTPIPQQQAGKIEVLEFFGYFCPHCAHLEPVLSEHIKTFKDDTYMRREHVVWGDEMKPLARLAAAVEMAGESDKANSHIFDAMVNQKINLADTDTLKKWLSEQTAFDGKKVLAAFEAPESQARAAQMEELTNKFQISGTPTVIVGGKYQVEFKDWQSGMTTIDQLVDKVREEQKKPQ

SEQ ID NO: 39 - protein, 558 aa, Neisseria meningitidis
MSVGLLRILVQNQVVTVEQAEHYYNESQAGKEVLPMLFSDGVISPKSLAALIARVFSYSILDLRHYPRHRVLMGVLTEEQMVEFHCVPVFRRGDKVFFAVSDPTQMPQIQKTVSAAGIEVELVIVEDDQLAGLLDWVGSRSTSLLQELGEGQEEEESHTLYIDNEEAEDGPVPRFIHKTLSDALRSGASDIHFEFYEHNARIRFRVDGQLREVVQPPIAVRGQLASRIKVMSRLDISEKRIPQDGRMQLTFQKGGKPVDFRVSTLPTLFGEKVVMRILNSDAASLNIDQLGFEPFQKKLLLEAIHRPYGMVLVTGPTGSGKTVSLYTCLNILNTESVNIATAEDPAEINLPGINQVNVNDKQGLTFAAALKSFLRQDPDIIMVGEIRDLETADIAIKAAQTGHMVFSTLHTNNAPATLSRMLNMGVAPFNIASSVSLIMAQRLLRRLCSSCKQEVERPSASALKEVGFTDEDLAKDWKLYRAVGCDRCRGQGYKGRAGVYEVMPISEEMQRVIMNNGTEVDILDVAYKEGMVDLRRAGILKVMQGITSLEEVTANTND

SEQ ID NO: 40 - protein, 273 aa, Neisseria meningitidis
MSLQNIIETAFENRADITPTTVTPEVKEAVLETIRQLDSGKLRVAERLGVGEWKVNEWAKKAVLLSFRIQDNEVLNDGVNKYFDKVPTKFADWSEDEFKNAGFRAVPGAVARRGSFVAKNVVLMPSYVNIGAYVDEGAMVDTWATVGSCAQIGKNVHLSGGVGIGGVLEPLQAAPTIIEDNCFIGARSEIVEGVIVEEGSVISMGVFIGQSTKIFDRTTGEIYQGRVPAGSVVVSGSMPSKDGSHSLYCAVIVKRVDAQTRAKTSVNELLRGI

SEQ ID NO: 41 - protein, 261 aa, Neisseria meningitidis
MGFLQGKKILITGMISERSIAYGIAKACREQGAELAFTYVVDKLEERVRKMAAELDSELVFRCDVASDDEINQVFADLGKHWDGLDGLVHSIGFAPKEALSGDFLDSISREAFNTAHEISAYSLPALAKAARPMMRGRNSAIVALSYLGAVRAIPNYNVMGMAKASLEAGIRFTAACLGKEGIRCNGISAGPIKTLAASGIADFGKLLGHVAAHNPLRRNVTIEEVGNTAAFLLSDLSSGITGEITYVDGGYSINALSTEG

SEQ ID NO: 42 - protein, 332 aa, Neisseria meningitidis
MSRPVPAVFGSVFHSQMPVLAYREGKWQPTEWQSSQDLSLAPGAHALHYGSECFEGLKAFRQADGKIVLFRPTANIARMRQSADILHLPRPETEAYLDALIKLVKRAADEIPDAPAALYLRPTLIGTDPVIGKAGSPSETALLYILASPVGDYFKVGSPVKILVETEHIRCAPHMGRVKCGGNYASAMHWVLKAKAEYGANQVLFCPNGDVQETGASNFILINGDEIITKPLTDEFLHGVTRDSVLTVAKDLGYTVSERNFTVDELKAAVENGAEAILTGTAAVISPVTSFVIGGKEIEVKSQERGYAIRKAITDIQYGLAEDKYGWLVEVC

SEQ ID NO: 43 - protein, 351 aa, Neisseria meningitidis
MTILSDVKALGQQIWLDNLSRSLVQSGELAQMLKQGVCGVTSNPAIFQKAFAGDALYADEIAALKQQNLSPKQRYETMAVADVRAACDVCLAEHESTGGKTGFVSLEVSPELSKDAQGTVEEARRLYAAIGCKNAMIKVPATDAGIDALETLVSDGISVNLTLLFSRAQTLKAYAAYARGIAKRLAAGQSVAHIQVVASFFISRVDGALDTTLPDHLKGKIAIALAKAAYQDWAQYFGSPEFAALETKGANRVQLLWASTGVKNPAYPDTLYVDSLIGAHTVNTVPDATLKAFIDHGTAKATLTEGVEEAQAQLAETAALGIDVETLATRLQEDGLKQFEEAFEKLLAPLA

SEQ ID NO: 44 - protein, 472 aa, Neisseria meningitidis
MSIKNAVKLIEESEARFVDLRFTDTKGKQHHFTVPARIVLEDPEEWFENGQAFDGSSIGGWKGIQASDMQLRPDASTAFVDPFYDDATVVLTCDVIDPADGQGYDRDPRSIARRAEAYLKSSGIGETAYFGPEPEFFVFDGIEFETDMHKTRYEITSESGAWASGLHMDGQNTGHRPTVKGGYAPVAPIDCGQDLRSAMVNILEELGIEVEVHHSEVGTGSQMEIGTRFATLVKRADQTQDMKYVIQNVAHNFGKTATFMPKPIMGDNGSGMHVHQSIWKDGQNLFAGDGYAGLSDTALYYIGGIIKHAKALNAITNPSTNSYKRLVPHFEAPTKLAYSAKNRSASIRIPSVNSSKARRIEARFPDPTANPYLAFAALLMAGLDGIQNKIHPGDPADKNLYDLPPEEDALVPTVCASLEEALAALKADHEFLLRGGVFSKDWIDSYIAFKEEDVRRIRMAPHPLEFEMYYSL

SEQ ID NO: 45 - protein, 242 aa, Neisseria meningitidis
MTKQLKLSALFVALLASGTAVAGEASVQGYTVSGQSNEIVRNNYGECWKNAYFDKASQGRVECGDAVAAPEPEPEPEPAPAPVVVVEQAPQYVDETISLSAKTLFGFDKDSLRAEAQDNLKVLAQRLSRTNVQSVRVEGHTDFMGSDKYNQALSERRAYVVANNLVSNGVPVSRISAVGLGESQAQMTQVCEAEVAKLGAKVSKAKKREALIACIEPDRRVDVKIRSIVTRQVVPAHNHHQH

SEQ ID NO: 46 - protein, 752 aa, Neisseria meningitidis
MYTRIMEISPWTLRSAKLEKEHKRLQESLTSLGNGYMGMRGSFEETYSADSHLGTYIAGVWFPDKTRVGWWKNGYPKYFGKAINAFNFSKVKIFVDGQEVDLAKNDVAGFSVELDMQHGVLRRSFTVFGVRFNVCKFLSVAQKELAVIRWEAVSVDGKTHQVRIDSIIDADVKNEDSNYEEKFWQVLDKGVSDSLSYIAAQTVANPFGVEQFIVNAEQTFAGSFKALGGSQTDWQVSNSFESEVGSTPETFEKRVIVTTSRDYQSLEAVKAAGRALSEKIAGVAFETLLDAHKAGWLHRWEIADVVIEGSDEAQQGIRFNLFQLFSTYYGEDARLNIGPKGFTGEKYGGATYWDTEAYAVPLYLALAEPEVTRNLLQYRRNQLPQAQHNAREQGLAGALYPMVTFTGIECHNEWEITFEEIHRNGAIPYAIYNYTNYTGDEGYLAKEGLEVLVEVSRFWADRVHFSKRNGKYMIHGVTGPNEYENNINNNWYTNTLAAWVLDYTREALAKYPRPDLNVRADELEKWADISANMYRPHDEELGVFVQHDGFLDKDIRPVSALSPDDLPLNQKWSWDKILRSPFIKQADVLQGIYFFSDRFNIDEKRRNFDFYEPMTVHESSLSPCIHSILAAELGKEEKAVEMYQRTARLDLDNYNNDTEDGLHITSMTGSWLAIVQGFAQMKTWGGKLSFAPFLPSAWTGYAFHINYRGRLIKVAVGKENVVFTLLKGESLDLQVYGKDITLDGSHTVALEK

SEQ ID NO: 47 - protein, 221 aa, Neisseria meningitidis
MTFTAVLFDLDGVITDTAEYHYRAWKKLAEELGISIDRKFNEQLKGVSRDDSLKRILAHGGKTVSEAEFAELTRRKNDNYVEMIQAVKPEDVYPGILPLLEALRANGKKIALASASKNGPFLLERMGLTHFFDAIADPAAVAHSKPAPDIFLAAAEGVDADIRQCIGIEDAAAGVAAIKAAGALPIGVGKAEDLGSDIALVSGTAELTYAYLQSVWEQSGR

SEQ ID NO: 48 - protein, 414 aa, Neisseria meningitidis
MEQQQRYISVLDIGTSKVLALIGEVQDDDKINIVGLGQAPSRGLRAGMVTNIDATVQAIRQAVNDAELMADTKITHVTTGIAGNHIRSLNSQGVVKIKDGEVTQADIDRAIETAKAINIPPDQKILDAVVQDYIIDTQLGVREPIGMSGVRLDTRVHIITGASTAVQNVQKCIERCGLKSDQIMLQPLASGQAVLTEDEKDLGVCVIDIGGGTTDIAVYMNGAIRHTSVIPAGGNLITKDLSKSLRTPLDAAEYIKIHYGVASCDTEGLGEMIEVPGVGDRTSRQVSSKVLAAIISARIQEIFGVVLGELQKSGFPKEVLNAGIVLTGGVSMMTGIVEFAEKIFDLPVRTGAPQEMGGLSDRVRTPRFSTAIGLLHAACKLEGNLPQPENGAVQEREGGGGLLARLKRWIENSF

SEQ ID NO: 49 - protein, 392 aa, Neisseria meningitidis
MEFVYDVAESAVSPAVIKVIGLGGGGCNAINNMVANNVRGVEFISANTDAQSLAKNHAAKRIQLGTNLTRGLGAGANPDIGRAAAQEDREAIEEAIRGANMLFITTGMGGGTGTGSAPVVAEIAKSLGILTVAVVTRPFAYEGKRVHVAQAGLEQLKEHVDSLIIIPNDKLMTALGEDVTMREAFRAADNVLRDAVAGISEVVTCPSEIINLDFADVKTVMSNRGIAMMGSGYAQGIDRARMATDQAISSPLLDDVTLDGARGVLVNITTAPGCLKMSELSEVMKIVNQSAHPDLECKFGAAEDETMSEDAIRITIIATGLKEKGAVDFVPAREVEAVAPSKQEQSHNVEGMIRTNRGIRTMNLTAADFDNQSVLDDFEIPAILRRQHNSDK

SEQ ID NO: 50 - protein, 362 aa, Neisseria meningitidis
MSQTIDELLLPHRNAIDTIDAEILRLLNERAQHAHAIGELKGTGAVYRPEREVAVLRRIQDLNKGPLPDESVARLFREVMSECLAVERPLTIAYLGPQGTFTQQAAIKHFGHAAHTMACPTIDDCFKQVETRQADYLVAPVENSTEGSVGRTLDLLAVTALQACGEIVLRIHHNLLRKNNGSTEGIAKVFSHAQALAQCNDWLGRHLPNAERIAVSSNAEAARLVAESDDGTVAAIAGRTAAEIYGLDMVAECIEDEPNNTTRFLVMGHHETGASGSDKTSLAVSAPNRAGAVASLLQPLTESGISMTKFESRPSKSVLWEYLFFIDIEGHRRDAQIQTALERLGERASFVKVIGSYPTAVL

SEQ ID NO: 51 - protein, 459 aa, Neisseria meningitidis
MQAFSLYPPVGHPDSAKKRQNRADVFLPFWKQDNFLGKSVQYRFEFAQIYFTMPKPCAGVTMGRGDFFFSNLFHQESARMKKSVLAVLAALSLAACGGSEKNAVQPQADAASAANAEAAATDTLNIYNWSNYVDESTVEDFKKANNLKLTYDLYENNETLEAKMLTGKSGYDLVVPGIAFLPRQIEAGAYQKVNKDLIPNYKNIDPELLKMLETADPGNQYAVPYFSGVNTIAITAKGKELLGGKLPENGWDLLFKPEYTHKLKSCGIALWDTPSEMFPILLNYLGKDPKGSNPEDLKAAAEVLKSIRPDVKRFSPSIIDELARGDICLAAGNGGDLNLAKARSEEVKNNVGIEVLTPKGMGFWIESWLIPADAKNVANAHKYINYTLDPEIAAKNGIAVTFAPASKPAREKMPAELVNTRSIFPNEQDMKDGFVMPQMSTDAKKLSVSLWQKIKVGTN

SEQ ID NO: 52 - protein, 602 aa, Neisseria meningitidis
MRTNYCGLISEQYLDQTVTVKGWVHRRRDHGGVIFIDLRDREGIVQVVIDPDTPEAFAAADSSRNEYVLSITGRVRNRPEGTTNDKMISGKIEILAKEIEVLNAAATPPFQIDDENISENVRLTNRVIDLRRPVMQRNLRLRYQVAMGVRRYLDAQGFIDIETPMLTRSTPEGARDYLVPSRVHPGEFFALPQSPQLFKQLLMVAGFDRYYQITKCFRDEDLRADRQPEFTQIDLETSFLNEDEIMDITEGMAKQVFKDALNVDLGDFPRMPYSEAMFYYGSDKPDMRINLKFTELTDLMKTEEFKVFRGAADMKGGRVVALRVPNGAEFSRKEIDEYTKFVGIYGAKGLAYIKVNDVSNLSNGEDSGLQSPIVKYLSENALKEIIARTGAQNGDIIFFGADKAKVVNEAIGALRIKVGLEHGKDNGYFTDEWKPLWVVDFPMFEYDEEADRYVAVHHPFTAPKEGHEDLMVSDPANCLARAYDMVLNGWEIGGGSIRIHRADVQEKVFAALKISPEEQQEKFGFLLDNLKFGAPPHGGLAFGLDRLVTLMTGAESIRDVIAFPKTQRAQCLLTNAPNSVDDKQLRELSLRLRQKATETKEV

SEQ ID NO: 53 - protein, 178 aa, Neisseria meningitidis
MRENKIIFTGPVGVGKTTAIAAISDEALVQTDASASDMTLDRKRNTTVAMDYGAISLDEDTKVHLYGTPGQERFNFMWEILSQGSMGLVLLLDNARTNPLKDLEFFLHSFRGLLEKAPVVVGITKMDIRSQPGIDVYHKYLAKHNLNVPVFEIDARKEDDVKQLVSAMLFSIDPGLEV

SEQ ID NO: 54 - protein, 361 aa, Neisseria meningitidis
MTVPHIPRGPVMADIAAFRLTEEEKQRLLDPAVGGIILFRRNFQNIEQLKTLTAEIKALRTPELIIAVDHEGGRVQRFIEGFTRLPAMSTLGEIWDKDGASAAETAAGQVGRVLATELSACGIDLSFTPVLDLDWGNCPVIGNRSFHRNPEAVARLALALQKGLTKGGMKSCGKHFPGHGFVEGDSHLVLPEDWRSLSELETADLAPFRIMSREGMAAVMPAHVVYPQVDTKPAGFSEIWLKQILRRDIGFKGVIFSDDLTMEGACGAGGIKERARISFEAGCDIVLVCNRPDLVDELREDFRIPDNPTLAQRWQYMANTLGSAAAQAVMQTADFQAAQAFVAGLASPQDTAGGVKVGEAF

SEQ ID NO: 55 - protein, 397 aa, Neisseria meningitidis
MFFKHIEAAPADPILGLGEAFKAETRPEKVNLGIGVYKDASGATPLVKAVKEAEKRLLESETTKNYLTIDGVADYNAQTQILLFGKDHEIIASRRAKTAQSLGGTGALRIAAEFAKRQLNAQTIWISNPTWPNHNAIAKAVGIQDKPYRYYDAAKHGLDWDGMIEDLSQAQKGDIVLLHGCCHNPTGIDPTPEQWETLAKLSAEKGWLPLFDFAYQGFGNGLEEDAYGLRVFLKHNTELLIASSYSKNFGMYNERVGAFTLVAEDEETAARAHSQVKTIIRTLYSNPASHGANTIALVLKNDDLKAQWIAELDEMRGRIKAMRQKFVGLLKAKGASQNFDFIIKQNGMFSFSGLTPEQVDRLKNEFAIYAVRSGRINVAGITDNNIDYLCESIVKVL

SEQ ID NO: 56 - protein, 348 aa, Neisseria meningitidis
MKMQAVVVNKNVAGDVEVIEREVRPLEYGEALVEVEYCGVCHTDLHVAAGDYGEKPGRVLGHEGIGLVKEVADGVKNLKVGDRVSIAWLFQSCGSCEYCNTGRETLCRSVLNAGYTADGGMATHCIVSADYAVKVPEGLDPAQASSITCAGVTTYKAIKVSGVRPGQWIAIYGAGGLGNLGVQYAKKVFGAHVVAIDINDDKLAFAKETGADLVVNAAKEDAAKVIQEKTGGAHAAVVTAVSAAAFNSAVNCVRAGGRVVAIGLPPESMDLSIPRLVLDGIEVVGSLVGTRKDLEEAFQFGAEGLVVPKVQLRALDEAPAIFQEMREGKITGRMVIDMKKECGCGHHH

SEQ ID NO: 57 - protein, 405 aa, Neisseria meningitidis
MEIILGIVMFTVIVLVLALMILFAKSKLVSEGDITIKVNGEKELTMPAGGKLLGALANEGIFIPSACGGGGSCGQCRVVVKSGGGDILPTELSHISKREAREGCRLSCQVNVKTDMDIEVPEEVFGVKKWECTVISNDNKATFIKELKLAIPEGEEVPFRAGGYIQIEAPPHTVAYKDFDIPKEYHEDWDKYNLWQYVSKVDEPILRAYSMASYPEEKGIIMLNVRIATPPPRVPDAPPGQMSSYIWSLKPGDKVTISGPFGEFFAKDTDAEMVFIGGGAGMAPMRSHIFDQLKRLNSKRKITFWYGARSKREMFYVEDFDQLAAEFPNFTWHVALSDPLPEDNWDGYTGFIHNVVYENHLKNHEAPEDCEFYMCGPPIMNQSVIKMLKDLGVEDENILLDDFGG

SEQ ID NO: 58 - protein, 121 aa, Neisseria meningitidis
MNLIQQLEQEEIARLNKEIPEFAPGDTVVVSVRVVEGTRSRLQAYEGVVIARRNRGLNSNFIVRKISSGEGVERTFQLYSPTVEKIEVKRRGDVRRAKLYYLRGLTGKAARIKEKLPARKG

SEQ ID NO: 59 - protein, 225 aa, Neisseria meningitidis
MSRVLLVDDDALLTELLTEYLSAEGLNVRSVPDGEAGVQEILSGQYDVVVLDSMMPKMNGLDVLKNVRARSTVPIIMLTAKGDDIDRIIGLEMGADDYVPKPCTPRELLARINAILRRAQHSGEQNNAPNSISVSDVVLYPAKRQASVKDMPLELTSTEFNLLEVLMRHAGQVVSKETLSVEALDRKLAKFDRSIDVHISSIRHKLGDASLIQTVRGLGYLFVKN

SEQ ID NO: 60 - protein, 354 aa, Neisseria meningitidis
MKAARFYDKGDIRIEDIPEPTVAPGTVGINVAWCGICGTDLHEFMEGPIFIPPCGHPHPISGESAPVTMGHEFSGVVYAVGEGVDDIKVGQHVVVEPYIIRDDVPTGEGSNYHLSKDMNFIGLGGCGGGLSEKIAVKRRWVHPISDKIPLDQAALIEPLSVGHHAYVRSGAKEGDVALVGGAGPIGLLLAAVLKAKGIKVIITELSKARKDKARESGVADYILDPSEVDVVAEVKKLTNGEGVDVAFECTSVNKVLDTLVEACKPAANLVIVSIWSHPATINVHSVVMKELDVRGTIAYCNDHAETIKLVEEGKINLEPFITQRIKLDELVSKGFERLIHNNESAVKIIVSPNL

SEQ ID NO: 61 - protein, 419 aa, Neisseria meningitidis
MLPVRFTRVSDGIKRLTPASNQTAFYHPFENPFCRYSSFYWSIAIMTATTASSAKPYLKIQGLVKKFGDNYAVDNIDLDIYQHEIFALLGSSGSGKSTLLRMLAGMESPNQGKIILDGQDITKLAPYDRPINMMFQSYALFPHMTVEQNIAFGLKQDKMPKGEIAARVEEMLRLVQMTKFAKRKPHQLSGGQQQRIALARSLAKRPKILLLDEPLGALDKKLRQQTQLELVNTLEQVGVTCIMVTHDQEEAMTMATRIAIMSDGQLQQVGTPSDVYDYPNSRFTAEFIGETNIFDGVVIEDHADYAVIECEGLENHVRIDHGLGGPSEQDLWVSIRPEDIDLYKEKPEYLGDYNWAKGTVKEIAYLGSFAIYHIKLGNGRVVKSQVPAPYWYVRNITPPTWDETVYISWPENQPTPLFR

SEQ ID NO: 62 - protein, 419 aa, Neisseria meningitidis
MHVSELQTLHISKLLELAEEHGIENANRFRKQDLVFAIVRQMMKKGEGFTCSGTLEILPDGFGFLRSADTSYLAGPDDIYVSPTQIRRFNLHTGDTIEGSVRVPKDNERYFALVRLDTINGDHPEVCRHKILFENLTPLFPTEQLKLERDLKSEENLTGRAIDLISPIGKGQRALLVAPPKSGKTVMLQNIAHAVTANYPEVELIVLLIDERPEEVTEMSRSVRGEVVSSTFDEPAQRHVQVAEMVLEKAKRMVEHKKDVVILLDSITRLARAYNTVVPTSGKILTGGVDANALHRPKRFFGAARNVEEGGSLTIIATALVETGSRMDDVIYEEFKGTGNMELHLDRRMAEKRLFPAININKSGTRREELLVPNDQLQRMWLLRKFLHPMDEIEAAEFLIGKIKASKNNDDFFELMRGK

SEQ ID NO: 63 - protein, 794 aa, Neisseria meningitidis
MADNYVIWFENLRMTDVERVGGKNASLGEMISQLTEKGVRVPGGFATTAEAYRAFLAHNGLSERISAALAKLDVEDVAELARVGKEIRQWILDTPFPEQLDAEIEAAWNKMVADAGGADISVAVRSSATAEDLPDASFAGQQETFLNINGLDNVKEAMHHVFASLYNDRAISYRVHKGFEHDIVALSAGVQRMVRSDSGASGVMFTLDTESGYDQVVFVTSSYGLGENVVQGAVNPDEFYVFKPTLKAGKPAILRKTMGSKHIKMIFTDKAEAGKSVTNVDVPEEDRNRFSITDEEITELAHYALTIEKHYGRPMDIEWGRDGLDGKLYILQARPETVKSQEEGNRNLRRFAINGDKTVLCEGRAIGQKVGQGKVRLIKDASEMDSVEAGDVLVTDMTDPDWEPVMKRASAIVTNRGGRTCHAAIIARELGIPAVVGCGNATELLKNGQEVTVSCAEGDTGFIYAGLLDVQITDVALDNMPKAPVKVMMNVGNPELAFSFANLPSEGIGLARMEFIINRQIGIHPKALLEFDKQDDELKAEITRRIAGYASPVDFYVDKIAEGVATLAASVYPRKTIVRMSDFKSNEYANLVGGNVYEPHEENPMLGFRGAARYVADNFKDCFALECKALKRVRDEMGLTNVEIMIPFVRTLGEAEAVVKALKENGLERGKNGLRLIMMCELPSNAVLAEQFLQYFDGFSIGSNDMTQLTLGLDRDSGLVSESFDERNPAVKVMLHLAISACRKQNKYVGICGQGPSDHPDFAKWLVEEGIESVSLNPDTVIETWLYLANELNK

SEQ ID NO: 64 - protein, 379 aa, Neisseria meningitidis
MKKTLVAAAILSLALTACGGGSDTAAQTPSAKPEAEQSGKLNIYNWSDYVDPETVAAFEKETGIKTRSDYYDSNETLEAKVLTGKSGYDLTAPSIANVGRQIKAGAYQKIDKAQIPHYGNIDKDLLKMMEAVDPGNEYAVPYFWGINTLAINTQQVKKALGTDKLPENEWDLVFKPEYTAKLKSCGISYFDSAIEQIPLALHYLGKDPNSENPEDIKAAVDMMKAVRGDVKRFSSSGYIDDMAAGNLCAAIGYGGDLNIAKTRAEEAANGVEIKVLTPKTGVGVWVDSFMIPRDAQNVANAHRYIDYTLRPEVAAKNGSFVTYAPASRPARELMDEKYTSDASIFPNKELMEKSFIVSPKSAESVKLGVKLWQGLKAGK

SEQ ID NO: 65 - protein, 500 aa, Neisseria meningitidis
MAKVLIVPVSAGLDASAAAQAFAKALDAQIFQAVDATAETLLAQGKSDDWFDALVGKVAALDAANLVIEGIAPDADKIYLAGKNVELALSLDAAAVFAVRSDNADADELANRVNLAKQFFAAAPGVLEGFVVDGAAASVAEAAAEKTGLTFFGSSDALKDVSVLAGREAKRLSPAQFRYNLIDFARQADKRIVLPEGAEPRTVQAAAICHEKGIARCVLLAKREEVEAVAKERGISLPDSLEIIDPASLVEQYVEPMCELRKSKGLTPEDARKQLQDTVVLGTMMMAQNDVDGLVSGAVHTTANTIRPALQLIKTAPGASLVSSVFFMLLPNQVLVFGDCAVNPNPTAQQLADIAIQSADSAKAFGIDPKVAMISYSTVNSGSGPDVDTVIEATKLAREKRPDLAIDGPLQYDAATVPGVGKSKAPGSPVAGQATVLVFPDLNTGNCTYKAVQRNANVLSVGPLLQGLRKPVNDLSRGALVEDIVFTIALTAVQAKQMEG

SEQ ID NO: 66 - protein, 331 aa, Neisseria meningitidis
MKTSIRYALLAAALTAATPALADITVYNGQHKEAAQAVADAFTRATGIKVKLNSAKGDQLAGQIKEEGSRSPADVFYSEQIPALATLSAANLLEPLPASTINETRGKGVPVAAKKDWVALSGRSRVVVYDTRKLSEKDLEKSVLNYATPKWKNRIGYAPTSGAFLEQVVAIVKLKGEAAALKWLKGLKEYGKPYAKNSVALQAVENGEIDAALINNYYWHAFAREKGVQNVHTRLNFVRHRDPGALVTYSGAAVLKSSQNKDEAKKFVAFLASKEGQRALTAVRAEYPLNPHVVSTFNLEPIAKLEAPQVSATTVSEKEHATRLLEQAGMK

SEQ ID NO: 67 - protein, 458 aa, Neisseria meningitidis
MHDKTWSGRFNEPVSELVKQYTASIGFDRRLAEWDIQGSLAHAQMLKETGVLDEGDLADIRRGMAEILEEIRSGKIEWSSDLEDVHMNIERRLTDKIGDAGKRLHTGRSRNDQVATDIRLWLRDQITVIQSLIQSLQTALLDLAEQNAETVMPGFTHLQVAQPVSFGHHMLAYVEMLGRDNERMADCRCRVNRMPLGAAALAGTTYPIQREITAELLGFEQICQNSLDAVSDRDFAIEFTAAASLVMVHLSRLSEELILWMSPRFGFIDIADRFCTGSSIMPQKKNPDVPELVRGKSGRVIGHLIGLITLMKSQPLAYNKDNQEDKEPLFDTADTLIDTLRIYADMMRGVTVKPDNMRAAVMQGFATATDLADYLVKKGMPFRDAHEVVAQAVRHADQAGVDLSELPLEVLQGFSDLIADDVYGVLTPEGSLNARNHLGGTAPEQVRFQVKRWREMLA

SEQ ID NO: 68 - protein, 177 aa, Neisseria meningitidis
MADFNQILTPGDVDGGIINVVNEIPAGSNHKIEWNRKLAAFQLDRVEPAIFAKPTNYGFIPQTLDEDGDELDVLLVTEQPLATGVFLEARVIGVMKFVDDGEVDDKIVCVPADDRNNGNAYKTLSDLPQQLIKQIEFHFNHYKDLKKAGTTKVESWGDAEEAKKVIKESIERWNKQA

SEQ ID NO: 69 - protein, 174 aa, Neisseria meningitidis
MKKALATLIALALPAAALAEGASGFYVQADAAHAKASSSLGSAKGFSPRISAGYRINDLRFAVDYTRYKNYKAPSTDFKLYSIGASAIYDFDTQSPVKPYLGARLSLNRASVDLGGSDSFSQTSIGLGVLTGVSYAVTPNVDLDAGYRYNYIGKVNTVKNVRSGELSAGVRVKF

SEQ ID NO: 70 - protein, 259 aa, Neisseria meningitidis
MKEHKARKRFGQNFLQDTRIISDIVNAVRPQADDVVIEIGPGLAAITEPLAKKLNRLHVVEIDRDIVCRLKTLPFADKLVIHEGDVLQFDFNGIAGKKKIVGNLPYNISTPLLFKLAEVADDVVDMHFMLQKEVVERMVAAPKSNDYGRLGVMLQYFFDMEMLIDVPPESFDPAPKVDSAVVRMIPVKHRIGKADDFEHFAKLVKLAFHQRRKTIRNNLKELAGDDDLQAVGINPQDRAEHIAPEKYVALSNYLAGKVV

SEQ ID NO: 71 - protein, 267 aa, Neisseria meningitidis
MKKILLTVSLGLALSACATQGTVDKDAQITQDWSVEKLYAEAQDELNSSNYTRAVKLYEILESRFPTSRHAQQSQLDTAYAYYKDDEKDKALAAIDRFRRLHPQHPNMDYALYLRGLVLFNEDQSFLNKLASQDWSDRDPKANREAYQAFAELVQRFPNSKYAADATARMVKLVDALGGNEMSVARYYMKRGAYIAAANRAQKIIGSYQNTRYVEESLAILELAYKKLDKPRLAADTRRVLETNFPKSPFLKQPWRSDDMPWWRYWH

SEQ ID NO: 72 - protein, 294 aa, Neisseria meningitidis
MSSGNIHIHSMTGFANAAAECGSKRINLDLRAVNHRFLDIQIRMPDDLRYLESGIREKISSHIARGKVECKIQIQDAENGSQSLELNRDLVGQLAEINKDLRKHHDLAKLGVADILRFPGVLASQRENTEELAKSITELTEKALKDFTAARKREGKKLGEHLLQRLEAMEEIIDALSELFPTLLETHKEKIRARLVEAVGSIDNDRLQQEFALFIQKSDIDEEFSRLRTHIAEVRRIVTEHKGSSGKRLDFLMQELNREANTLGSKSIAAECTQASVELKVLIEQMREQVQNIE

SEQ ID NO: 73 - protein, 637 aa, Neisseria meningitidis
MLNITLPDGSVRQYESPVTVAQIAASIGAGLAKATVAGRVNGKLVDACDPIVEDSAVQIITPKDQEGIEIIRHSCAHLVGHAVKQLYPNAKMVIGPVIEEGFYYDIATEKPFTPEDVAAIEARMKELIAQDYDVVKIMTPRAEAIKIFQERGEEYKLRLIDDMPEVEAMGMYHHQEYVDMCRGPHVPNTRFLKNFKLTKLAGAYWRGDSNNEMLQRIYGTAWATKDELKAYIQRIEEAEKRDHRKLGKQLDLFHLQDEAPGMVFWHPKGWALWQVIEQHMRKELNAAGYKEVKTPQIMDKTFWEKSGHWDNYKDNMFVTSSEKREYAVKPMNCPGHVQIFNNGLRSYRDLPMRLAEFGSCHRNEPSGALHGLMRVRGFVQDDAHIFCTEDQIVSEARAFNELLIRIYKQFGFHDVSVKLSLRPEKRAGSDDVWDKAEQGLREALTACGVEWGELPGEGAFYGPKIEYHVRDALGRSWQCGTLQLDFVLPERLNAEYVTENNDRARPVMLHRAILGSLERFIGILIENHAGSFPLWLAPVQLVIMNITENQADYCREVAAKLQAAGFRAELDLRNEKIGYKIRDNSQYRFPYQIVVGDKEKQENKVAVRRKAEDLGSLDLDDFIAQLQQEITDALVNH

SEQ ID NO: 74 - protein, 330 aa, Neisseria meningitidis
MENVNRIVAEGIAAVEAAQDFNALEQIKARYLGKTGELTGLLKTLGQMSPEERKTIGAHINECKNRFQTAFNAKREALNEVKLQARLAAEALDITLPGRAQEGGSLHPVTLTLQRVVELFHGMGFEVADGPEIEDDFHNFQALNIPANHPARAMQDTFYVENGDVLRTHTSPIQIRYMLDKKEPPIRIIAPGRVYRVDSDATHSPMFHQAEGLWVEEGVTFADLKAVFTDFIRRFFERDDLQVRFRPSFFPFTEPSAEIDIMGENGKWLEVGGCGMVHPNVLKNVNIDPEKYTGFAFGIGLDRFAMLRYNVNDLRLFFDNDLNFLKQFAK

SEQ ID NO: 75 - protein, 787 aa, Neisseria meningitidis
MQFSYSWLKTQADTELSSDKLEHLLTMSGLEVEEAETAAPAFAGVVIAEVKSVEKHPDADRLNVTRVDAGTGGLVQIVCGAPNVKAGIKVPCSLPGAVLPGNFKIKPTKMRGEVSDGMLCSTDELGLPDDGVNGLHILPEDAPVGTNIREYLDLDDTLFTLKITPNRADCLSIKGIAREVSALTGCAFRQPEIHTAPITGSRKQPVQINAPADCGRFISRVIENVNARATTPDWMKQRLERSGIRSISALVDIGNYVMLEIGQPMHVFDADKLSGSLHIRRAREGETLECLNEKTVSLSENTLVVADEKGVLSLAGLMGGAASAVSDGTQNIVLEAAWFAPEIIAGKSRQYGFGSDSSFRFERGVDYRLQADAIERATELVLQICGGAAGEMVEAQGELPEAKQVGLRLDRLKTVLGVDIPAEQVETILQHLGLQPEKTAEGFRVTAPSFRFDIEIEADLIEEIGRVYGYENIPDDYTSGRLKMLELPETRRPRFAVYNEMAARGYREVVSYAFVDEQWEQDFAANADPIRLQNPLAAQYAVMRSTLIGGLVEILQNNLNRKQNRVCVFEIARVFSKGSDGQFVQNERIGGLWYGAVMPEQWGGKTRNADFYDIKADVENLLKNKAVEFVKTGHPALHPGRAANIVSDGKVIGFVGELHPKWLQKYDLPQAPLVFEIDMAAVLECGKTRYRVVSKFQPVRRDLAFVMPEAMSHDDLLLVLKGAANKLVQEISVFDVYRGTGLPEGMKSVAVKVILQDMENTLTDEAVEPLIGKLIGAATAAGARLRS

SEQ ID NO: 76 - protein, 245 aa, Neisseria meningitidis
MGGQKTHFGFSTVNEDEKAGKVAEVFHSVAKNYDIMNDVMSAGLHRVWKHFTINTAHLKKGDKVLDIAGGTGDLSRGWAKRVGKEGEVWLTDINSSMLTVGRDRLLNEGMILPVSLADAEKLPFPDNYFNLVSVAFGLRNMTHKDAALKEMYRVLKPGGTLLVLEFSKIYKPLEGAYDFYSFKLLPVMGRLIAKDAESYQYLAESIRMHPDQETLKQMMLDAGFDSVDYHNMSAGIVALHKGVKF

SEQ ID NO: 77 - protein, 287 aa, Neisseria meningitidis
MSEIGLVKIYFGKVRDLYEIDDKRMLMVASDRLSAFDVILDDPIPSKGEILTQISNFWFKKLAHIMPNHFTGQTVYDVLPENEAKALEKRAVVAKKLTPVKVEAIVRGYLAGSGWKDYQKTGSVCGIQLPEGMQEAQQLPEVIFTPSTKAAVGDHDENISFEECGRIIGKELAEEVRAKAVRLYTEAAEYAKSRGIIICDTKFEFGLDENGTLTLMDEVLTPDSSRFWPADQYKVGTNPPSFDKQFVRDWLEQSGWNKKAPAPKVPADVIQKTVEKYREALTLLTQD

SEQ ID NO: 78 - protein, 707 aa, Neisseria meningitidis
MMFDKHVKTFQYGNQTVTLETGEIARQAAAAVKVSMGDTVVLVAVTTNKEVKEGQDFFPLTVDYLERTYAAGKIPGGFFKREGKQSEKEILTSRLIDRPIRPLFPEGFYHDIQIVAMVVSVDPEIDSDIPAMLGASAALVLSGVPFAGPIGAARVGYVNGVYVLNPTKAELAKSQLDLVVAGTSKAVLMVESEAKILPEDVMLGAVVYGHDQMQVAINAINEFADEVNPELWDWKAPETNEELVAKVRGIAGETIKEAFKIRQKQARSAKLDEAWSAVKEALITEETDTLAANEIKGIFKHLEADVVRSQILDGQPRIDGRDTRTVRPLNIQTSVLPRTHGSALFTRGETQALAVATLGTSRDEQIIDALSGEYTDRFMLHYNFPPYSTGEVGRMGAPKRREIGHGRLAKRALLAVLPKPEDFSYTMRVVSEITESNGSSSMASVCGGCLSLLSAGVPLKAHVAGIAMGLILEGNKFAVLTDILGDEDHLGDMDFKVAGTTEGVTALQMDIKIQGITKEIMQIALAQAKEARLHILDQMKAAVAGPQELSAHAPRLFTMKINQDKIREVIGKGGETIRSITAETGTEINIAEDGTITIAATTQEAGDAAKKRIEQITAEVEVGKVYEGTVVKILDNNVGAIVSVMPGKDGLVHISQIAHERVRNVGDYLQVGQVVNVKALEVDDRGRVRLSIKALLDAPAREENAAE

SEQ ID NO: 79 - protein, 310 aa, Neisseria meningitidis
MKIANSITELIGNTPLVKLNRLTEGLKAEVAVKLEFFNPGSSVKDRIAEAMIEGAEKAGKINKNTVIVEATSGNTGVGLAMVCAARGYKLAITMPESMSKERKMLLRAFGAELILTPAAEGMAGAIAKAKSLVDAHPDTYFMPRQFDNEANPEVHRKTTAEEIWRDTDGKVDVFVAGVGTGGTITGVGEVLKKYKPEVKVVAVEPEASPVLSGGEKGPHPIQGIGAGFIPTVLNTKIYDSITKVSNEAAFETARAIAEKEGILVGISSGAAVWSALQLAKQPENEGKLIVVLLPSYGERYLSTPLFADLA

SEQ ID NO: 80 - protein, 424 aa, Neisseria meningitidis
MPSETSSPRKENETEVHIPAAPFIVKQSGSNALAVCALVLAALGLGTSGFLFVQGQNVLKNQELAFNQKIDKAALGESENAALLKDNLNRQAAIQSELDRLDGNVKANGEQILEMQKSYRELTKGRADWLVDETETILNLAAQQLVLTGNIQTAVGVLEHIDSRLSRFNQAELLPIKQAVSSDLAELKNRPYVDISGTALRLDRLETAVSGLPLMLDGVLKPGVQVKNEAASASWWQNVWEKSLGTLKGLVEIRRLENNDAMLISPEQAYFVRENLRLRLLDARTALMQRNSEVYQGDLNNAEAAVRQYFDAKSPATQSWLKELAELKALDVRMTADDGLKNSLNAVRAYRDGTRMTAAENQEAEQAASEPANEKTASEPAAASDVKTIEAPSLPSERKPEQPAKKQTVPEKAGRSPSAKGERA

SEQ ID NO: 81 - protein, 169 aa, Neisseria meningitidis
MIILHTNKGDIKIELDFDKAPVTAKNFEQYVKDGFYDGVIFHRVIKGFMIQGGGMDENMNEKETRDPIQNEASNGLPNDKYTIAMARTSDPHSASAQFFINTADNAFLNFRSKELYGKTVVQDWGYAVFGKVVDGFDVVDAIEGVSTKRHGYHDDVPSEPVVIIKAEAV

SEQ ID NO: 82 - protein, 221 aa, Neisseria meningitidis
MTVLSKEQVLSAFKNRKSCRHYDAARKISAEDFQFILELGRLSPSSVGSEPWQFIVVQNPEIRQAIKPFSWGMADALDTASHLVVFLAKKNARSDSPFMLESLKRRGVTEPDAVAKSLARYQAFQADDIKILDDSRALFDWCCRQTYIALANMMTGAAMAGIDSCPVEGFNYAEMERILSGQFGLFDAAEWGVSVAATFGYRVQEIATKARRPLEETVIWA

SEQ ID NO: 83 - protein, 383 aa, Neisseria meningitidis
MQTWQLPEHIADVLPTNARQLESAREQLLALFRVHGYELVQPPLMEYAHSLLTHIDAGLSLKTILVTDRLSGRQLGIRADITPQVARIDAHLLSANQGINRLCYAGPVLHAQPDGLLNMREPLQAGAEMYGFADIRGDIELIDLMLKSMKIADMGKVLLSLGHIGIFRALSDAAHLDAGQSATLLALMQDKDTGAVEAQVKAWKLDGMWAKAFSLLPRLYGGREVLSDARGRLPDLSAVGGALGELQAVCDAFPDCEIHIDLSELRVDNYHTGLLYAAYAADFHDAVARGGRYDGLGGYFGRARPATGFSFDLRSFIGRLPAIERQPAVLVDAEDAEAAHEAVEALREQGQCVVIDYGIGHNVSEELAGRLKKTDGVWQVVKR

SEQ ID NO: 84 - protein, 434 aa, Neisseria meningitidis
MAMAKNVVVIGAQWGDEGKGKIVDWLAEEAGGVVRFQGGHNAGHTLVVGGKKTILRLIPSGILHESLDCFIGSGVVVSPEALLGEIDELNAAGVKNVEGRLKIAPTCPLILPYHIALDQAREASRGKGKIGTTGRGIGPAYEDKVARRAIRAADLLHPEKLREKLDAVLAYYNVQLQHLHNAEPVKAEDVMAVIEKVAPRIAPMITDVSRVLNEKNKNGEKLLFEGAQGALLDIDYGTYPFVTSSNCLAGAASAGAGVGPQMLDYVLGIVKAYTTRVGSGPFPTELFDEVGVGLAERGHEFGSVTGRARRCGWFDAAALKRSIQINGISGMCITKLDVMDGVETINICVGYELPDGGKTDILPCGSDAVETCKPIYETMPGWRESTFGVKDYGALPENAKAYLKRIEEVCGAPVAIVSTGPDREETIVLHHPFA

SEQ ID NO: 85 - protein, 334 aa, Neisseria meningitidis
MTIIVTGAAGFIGSNIVKALNQRGITDIVAVDNLSKGEKFKNLAECEIAHYLDKHEFIRQVREHILPYQNIEAVFHQGACSDTMNHDGLYMMDNNYQYTLDLLDWCQDERIPFLYASSAAVYGKGEIFREERELEKPLNVYGYSKFLFDQVLRRRMKEGLTAQVVGFRYFNVYGQHEQHKGRMASVAFHHFHQYREHGYVNLFGSNDGYGNGEQTRDFVSVEDVAKVNLYFFDHPELSGIYNLGTGRSQQFNELAAATVNACRAAEGKPEMSLKELVEEELIRYIPFPDALKGKYQSFTQADITKLREAGYKEEFFDVKSGVDRYVKWMLENLA

SEQ ID NO: 86 - protein, 431 aa, Neisseria meningitidis
MAQKIQSVKGMNDLLPVKQKDFKLTAAFWQAFEDTVGRWTRAYGYQQIRTPIVEQTGLFVRSIGEETDVVGKEMYTFSDSNDSLSLSLRPEGTASCLRAVVEHNLLYNSPQKLWYMGPMFRRERPQKGRYRQFHQVGIEALGFEGPDIDAEIIAMSADLWEKLGIREYLTLEINSLGNREERAAHRAALVEYLTRYEDKLDEDSKRRLKTNPLRVLDTKNPDLQEICNAAPRLVDYLGEDSQNHYVRFKAMLDGLGIQYIENPRLVRGLDYYNQTVFEWTTDKLGAQATVCGGGRYDGLIEELGGKPAPSIGFAMGIERLLLLVSEYGSLEVNAAPDVYAMHQGEGADLQVMKYAQALRAQGFNVMQHSGYQSLKAQMKKADNSGARFALIVAQDELANGTVTLKDMNGAHGQQTVAAEDLTPTLQQWKNA

SEQ ID NO: 87 - protein, 327 aa, Neisseria meningitidis
MAAYDSLMVFTGNANPELAQRVVRHLDISLGNASVSKFSDGEVAVELLENVRGRDVFILQPTCAPTNDNLMEILTMADALKRASAGRITTAIPYFGYARQDRRPRSVRVPISAKLVANMLYSAGIDRVLTVDLHADQIQGFFDIPVDNIYATPILLNDIKQQRIENLTVVSPDIGGVVRARAVAKSLNADLAIIDKRRPKANVAEVMNIIGDIQGRTCLIVDDMIDTANTLCKAAVALKERGAERVLAYASHAVFSGEAVSRIASSEIDQVVVTDTIPLSEAAKNCDRIRQVTIAGLLAETVRRISNEESVSYLFNEEVMTGSMLLP

SEQ ID NO: 88 - protein, 190 aa, Neisseria meningitidis
MTYEIQASVREAQGTGASRRLRREGQIPGILYGEGQEPVAIAVDHKTVFYALEKESFHTALIKLSLNGETKDVIVRDFQMHPFRREVQHIDFQAVKADQLVRIRVPLHIVNAENSQAVKLQGGRVSLLNTSVEVVALPANIPAFLDLDCAEVVAGDILHLSDIKLPEGVESVSLKRNENLAVATVTGKKR

SEQ ID NO: 89 - protein, 508 aa, Neisseria meningitidis
MNTPLPYSDYLIRILTASVYDVAVETPLEPARSLSVRLKNNILLKREDLQPVFSFKIRGAYNKMSKLPKDALACGVIAASAGNHAQGVALSAQRLGCRAVIVMPETTPKIKVDAVKSHGGEVVLRGVSYNDAYDYAMELAEKEGLTYIAPFDDPDVIAGQGTVGMEIVSQHPDPIRAVFVPIGGGGLAAGVAAFIKQVRPEIKVIGVQTNDSCCMKQSVEAGEIVHLKDVGLFSDGTAVKVVGNETFRLCKELLDEIITVDTDAVCGAVKDIFDDTRSITEPAGALALAGLKAYIAREGAENQTLIAVTSGANMNFHRLRHVSERSELGEGNEGIFAVTIPEERGSFLKFVNILGNRNITEFNYRYGDDEKAHIFVGLQAAGPQDLAVIGSRLDEAGLPNVDLTNNEIAKIHIRYMVGGRTDKVENERLVSFEFPERPGALARFLNHMQGGWNITLFHYRNHGADYGRILVGIDVPPHDAAAFDGFLESLGYSYHEETQNAAYKLFLA

SEQ ID NO: 90 - protein, 195 aa, Neisseria meningitidis
MEHKLPQLPYELDALSPHLSKETLEFHYGKHHQTYITNLNNQIKGTEFENLPLEEIVKKSSGGVFNNAAQTWNHTFYWLGFTSKGQGKPAGELAAAIDAKWGSFEKFQEAFNACAAGTFGSGWAWLVKTPAGGLDLVSTSNAATPLTTENTPLLTCDVWEHAYYIDYRNSRPNYLKGFWEIVNWDEVAKRFAALS

SEQ ID NO: 91 - protein, 468 aa, Neisseria meningitidis
MNDYAAMPSEDREVGALSLPPHSMEAEQSVLGGLMLENPAWDRIADVVSGEDFYRHEHRLIFRSIAKLINESRPADVITVQEDLQRNEELEAAGGFEYLITLAQNTPSAANIRRYAEIVRERSIMRQLAEVGTEIARSAYNPQGRDAGQLLDEAENKVFQIAESTAKSKQGFLEMPDLLKEVVQRIDMLYSRDNPDEVTGVPTGFIDLDKKTSGLQPGDLIIVAGRPSMGKTAFSINIAEHVAVEGRLPVAVFSMEMGGAQLVMRMLGSVGRLDQSVLKTGRLEDEHWGRLNEAVVKLSDAPVYIDETPGLTALELRARARRLARQFNNKLGLIVIDYLQLMAGSGRSDNRASELGEISRSLKALAKELQVPIIALSQLSRTVESRTDKRPMMSDLRESGAIEQDADLIMFMYRDEYYNQDSPMKGLAECIIGKHRNGPVGKIFLTWTGQFTKFDNAAYIPEEAKIED

SEQ ID NO: 92 - protein, 395 aa, Neisseria meningitidis
MNTLLNQLKPYPFARLREAMQGISAPEGLEAVPLHIGEPKHPTPKVITDALTASLHELEKYPLTAGLPELRQACANWLKRRYDGLTVDADNEILPVLGSREALFSFVQTVLNPVSDGIKPAIVSPNPFYQIYEGATLLGGGEIHFANCPAPSFNPDWRSISEEVWKRTKLVFVCSPNNPSGSVLDLDGWKEVFDLQDKYGFIIASDECYSEIYFDGNKPLGCLQAAAQLGRSRQKLLMFTSLSKRSNVPGLRSGFVAGDAELLKNFLLYRTYHGSAMSIPVQRASIAAWDDEQHVIDNRRMYQEKFERVIPILQQVFDVKLPDASFYIWLKVPDGDDLALARNLWQKAAIQVLPGRFLARDTEQGNPGEGYVRIALVADVATCVKAAETIVSLYR

SEQ ID NO: 93 - protein, 741 aa, Neisseria meningitidis
MTQKSTIVYTHTDEAPALATQSLLPIVQAFARHADIDVKTSDISLSGRILAAFPEYLTEAQRVPDALAELGELVKQPDANVIKLPNISASVPQLTAAIKELQSKGFAVPDYPADPQTDEEKAVRERYDRIKGSAVNPVLREGNSDRRAPKAVKNFAKKNPHSMGAWTKDSKTHVATMQSGDFFHNEQSVIVPEATSVSIVFTDKQGNKKELREPVALKAGEIIDATVMSKKALLAFLAEQVKDAKAKGVLFSLHMKATMMKVSDPIIFGHAVKVFFAPVFEKFGDKLAAAGVNVNNGFGNLLANLDKLDADTRTAVEAEIAAVYAANPDLAMVDSDKGITNLHVPSDVIVDASMPAMIRNSGRMWDKNGKAQDTKAVIPDSSYAGVYQATIDFCREHGAFDPTTMGTVPNVGLMAQAAEEYGSHNKTFEIEADGQVQVIDAAGKVLMQHDVEAGDIWRMCQTKDAPVKDWVQLAVNRARLSNTPAVFWLDENRPHDKSLLAKVKAYLAELDTNGLDIRVLAPEEAAKFSLGRLKNGEDTISVTGNVLRDYLTDLFPILELGTSAKMLSIVPLMNGGGMFETGAGGSAPKHVQQFLEENHLRWDSLGEFLALAVSFEHLAQKTGNAKAQVLADTLDAATEKLLLNDKSPKRKAGELDNRGSHFYLTLYWAQELAAQDKDAELKAAFTPLAAALTADEAKIVAELSAVQGKAADIGGYYAANPEKAAQVMRPSVTFNQALNAL

SEQ ID NO: 94 - protein, 758 aa, Neisseria meningitidis
MTTLHFSGFPRVGAFRELKFAQEKYWRKEISEQELLAVAKDLREKNWKHQVAANADFVAVGDFTFYDHILDLQVATGAIPARFGFDSQNLSLEQFFQLARGNKDQFAIEMTKWFDTNYHYLVPEFHADTEFKANAKHYVQQLQEAQALGLKAKPTVVGPLTFLWVGKEKGAVEFDRLSLLPKLLPVYVEILTALVEAGAEWIQIDEPALAVDLPKEWVEAYKDVYATLSKVSAKILLSTYFGSVAEHAALLKALPVDGLHIDLVRAPEQLDAFADYDKVLSAGVIDGRNIWRANLNKVLETVEPLQAKLGDRLWISSSCSLLHTPFDLSVEEKLKANKPDLYSWLAFTLQKTQELRVLKAALNEGRDSVAEELAASQAAADSRANSSEIHRADVAKRLADLPANADQRKSPFADRIKAQQAWLNLPLLPTTNIGSFPQTTEIRQARSAFKKGELSAADYEAAMKKEIALVVEEQEKLDLDVLVHGEAERNDMVEYFGELLSGFAFTQYGWVQSYGSRCVKPPIIFGDVSRPEAMTVAWSTYAQSLTKRPMKGMLTGPVTILQWSFVRNDIPRSTVCKQIALALNDEVLDLEKAGIKVIQIDEPAIREGLPLKRADWDAYLNWAGESFRLSSAGCEDSTQIHTHMCYSEFNDILPAIAAMDADVITIETSRSDMELLTAFGEFQYPNDIGPGVYDIHSPRVPTEAEVEHLLRKAIEVVPVERLWVNPDCGLKTRGWKETLEQLQVMMNVTRKLRAELAK

SEQ ID NO: 95 - protein, 245 aa, Neisseria meningitidis
MALQDRTGQKVPSVVFRTRVGDTWKDVSTDDLFKGKKVVVFSLPGAFTPTCSSSHLPRYNELFGAFKENGVDAIYCVSVNDTFVMNAWAAEEESDNIYMIPDGNGEFTEGMGMLVGKEDLGFGKRSWRYSMLVNDGVVEKMFIEPEEPGDPFKVSDADTMLQFVAPDWKAQESVAIFTKPGCQFCAKAKQALQDKGLSYEEIVLGKDATVTSVRAITGKMTAPQVFIGGKYIGGSEDLEAYLAKN

SEQ ID NO: 96 - protein, 467 aa, Neisseria meningitidis
MKKIQADVVVIGGGTAGMGAFRNARLHSDNVYLIENNVFGTTCARVGCMPSKLLIAAAEARHHALHTDPFGVHLDKDSIVVNGEEVMQRVKSERDRFVGFVVADVEEWPADKRIMGSAKFIDEHTVQIDEHTQITAKSFVIATGSRPVILPQWQSLGNRLIINDDVFSWDTLPKRVAVFGPGVIGLELGQALHRLGVKVEIFGLGGIIGGISDPVVSDEANAVFGEELKLHLDAKTEVKLDADGNVEVHWEQDGEKGVFVAEYMLAAVGRRPNVDNIGLENINIEKDARGVPVADPLTMQTSIPHIFIAGDASNQLPLLHEAADQGKIAGDNAGRYPNIGGGLRRSTIGVVFTSPQIGFVGLKYAQVAAQYQADEFVIGEVSFKNQGRSRVMLVNKGHMRLYAEKATGRFIGAEIVGPAAEHLAHLLAWAHQMKMTVPQMLDMPFYHPVIEEGLRTALRDADAKLKA

SEQ ID NO: 97 - protein, 942 aa, Neisseria meningitidis
MMDEKLNFSYLFGSNAPYIEELYEAFLENPDAVDEKWKQYFTDLSKQPGTVAVDVAHTPIRESFVTLAKKKIASAVAGGADEAMLKKQVSVLRLISAYRIQGVGAAQLDPLKRIPPRDIEALDPKFHGLSDADMALQFNMGEGDFANRGKLPLSQIISNLKQTYCGHIALEYIYIPNTEERRWVRNYFESVLSTPHYNADQKRRILKEMTAAETLERYLHTKYVGQKRFGVEGGESAIAGLNYLIQNAGKDGVEEVIIGMAHRGRLNVLVNILGKKPGDLFAEFEGRAEIKLPSGDVKYHMGFSSDIATPHGPMHVSLAFNPSHLEIVNPVVEGSARAKQKRLGENGRDKVLPVLIHGDSAFIGLGVNQATFNLSKTRGYTTGGTVHIVINNQIGFTTSDIRDTRSTVHCTDIAKMVSAPVIHVNGDDPERVCFAIQAALDYRKKFHKDIVIDVVCYRKWGHNEGDDPTLTQPMMYKKVSQHPGARALYTEQLIAEGVVTQAEADGYIQAYRDALDKGEHVEQTTLSNFQRTQIDWSKYQGKDWREHIETGLPAADIERLTEKFTAVPEGFALHPTAKRVIEARKAMASGKQAIDWGMAETLAYASLVTKGHGVRISGEDSGRGTFSHRHAVLHDQKREKWDDGTYVPLRHMGEGMGEFLVIDSILNEEAVMAFEYGFACSAPDKLTIWEAQFGDFANGAQVTIDQFLSSGETKWGRLCGLTTILPHGYDGQGPEHSSARVERWLQLCSENNMQVIMPSEASQMFHLLQRQVLGSYRKPLVIFMSKRLLRFKGAMSPLENFTEGSTFRPVIGDTAERASNDSVKRVVLCAGQVYYDLEAGRAERKLEDDVAIVRVEQLYPFPYDEVKAELAKYPNAKSVVWAQEEPKNQGAFYQIRHRIEDVISEEQKLSYAGRPSSASPAVGYSSKHIAQLKQLVEDALAL

SEQ ID NO: 98 - protein, 393 aa, Neisseria meningitidis
MIIDVKVPMLSESVSEGTLLEWKKKVGEAVARDEILIDIETDKVVLEVPSPQAGVLVEIVAQDGETVVADQVLARVDTAATAAAEAPAAAPAEAAPAAAPAATQNNAAMPAAAKLAAETGVDVNALQGSGRDGRVLKEDVQNAAAKPAGAAAPAVALPAGARPEERVPMSRLRARVAERLLASQQENAILTTFNEVNMKPIMDLRAKYKEKFEKEHGVKLGFMSFFVKAAVAALKKYPVVNASVDGKDIVYHGYFDIGIAIGSPRGLVVPILRDADQMSIADIEQAIVDYAKKAKDGKIAIEDLTGGTFSITNGGTFGSMMSTPIINPPQSAILGMHATKERAVVENGQVVVRPMMYLALSYDHRIIDGREAVLTLVAIKDALEDPARLLLDL

SEQ ID NO: 99 - protein, 388 aa, Neisseria meningitidis
MNLHEYQAKELLASYGLPVQGGILAHNGEEAAAAYDKLGGKFAVVKAQVHAGGRGKAGGVKVVKSREEAKEVAESLIGTNLVTYQTDANGQPVNSVLVCEDMYPVQTELYLGAVVDRSTRRITFMASTEGGVEIEKVAAETPEKIFKVTVDPLVGLQPCQAREVAFQLGLKDKQINEFVKLMTGAYKAFVENDFALFEVNPLAVRENGALACVDGKIGIDSNALYRLPKIAELRDKSQENERELKASEFDLNYVALEGNIGCMVNGAGLAMATMDIIKLKGGQPANFLDVGGGATKDRVVEAFKLILEDKSVQGVLINIFGGIVRCDMIAEAIVAAVKEINVNVPVVVRLEGNNAELGAKILNESGLKLTSADGLNDAAEKIVAAVNA

SEQ ID NO: 100 - protein, 296 aa, Neisseria meningitidis
MSVLINKDTKVLVQGFTGKNGTFHSEQALAYGTKVVGGVTPGKGGQTHLNLPVFNTMKEAVKETGADASVIYVPAPFVLDSIVEAVDSGVGLVVVITEGVPTLDMLKAKRYLETNGNGTRLVGPNCPGVITPGECKIGIMPGHIHTPGRIGIISRSGTLTYEAVAQTTKLGLGQSTCIGIGGDPIPGMNQIDALKLFQEDPDTDAIIMIGEIGGTAEEEAAEYIQSNVSKPVVGYIAGVTAPKGKRMGHAGAIISGGKGTAEEKFAAFEKAGIAYTRSPAELGTTMLEVLKAKGLA

SEQ ID NO: 101 - protein, 526 aa, Neisseria meningitidis
MSSIKRALISLSDKTGAVEFAQTLHKLGVEILSTGGTAKLLADAGVPVIEVADYTGFPEMLDGRVKTLHPKIHGGILGRRDLDEHVAKMEEHGIGNIDLVCVNLYLFAATIAKPNCTLEDAIENIDIGGPTMVRSAAKNWKHVAIVTDTADFPAIAAELEANNGALSDKTRFNLSRKAFSHTAQYDGMISNYLTSLSDDVLSGTPEIAGFPGRFNQSWIKVQDMRYGENPHQRAAFYRDIDPAAGSLAAYKQLQGKELSYNNIADADAAWEAVKSFDVPACVIVKHANPCGVAIASNTLDAYKLAYATDTTSAFGGIIAFNREVDGATVKQITDNQFMEVLMAPKFTAEALEIAAAKKNVRVLEVPLEAGANRFELKRVGGGLLVQTPDIHRISRADLKVVSKRQPTEQEWNDLLFVWNVAKYVKSNAIVFGKGGQTYGIGAGQMSRVDSTRIAARKAQDAGLDLNGACAASDAFFPFRDGVDVIAEQGIKAIIHPAGSMRDQEVFDAADEHGIAMVVTGIRHFRH

SEQ ID NO: 102 - protein, 563 aa, Neisseria meningitidis
MSASQLLSRLTQTVGEKYIITDPAKTEQYRQGYRFGEGKALAVVRPGSILEMWKILQACVEADVIVITQAANTGLTGGSTPDGNDYDRDIVIVNTMRMNIIQTINNNEQVVCLPGSTLNQLELLLKPLGREPHSVIGSSCIGASVLGGVCNNSGGALVQRGPAYTEMALFAQINEEGRLELVNHLGIDLGNTPEEILTNLQGHHYQNKDITQDAGKGHDHAYCEHVRQVDEPTAARFNADPARHYEASGCAGKLMVFAVRLDTFPQEKQTAVFYIGTNDINELTDIRRAALGEFESLPVSGEYIHRHAFDIADVYGKDTFYVIKKFGTHQLPKLFDLKARVDRFGKKVSFLPKHFSDKAMQFVSKFLPDHLPKSMRDYRDKYEHHLILKMGGKGVDEARAFLKEYFAHHGGAFFECNAEETQAAMLHRFAVASAAIRYRAVHDDEVEDLVALDIALRRDDRDWFEKLPPEIDNKIIHKLYYGHFMCHVFHQDYIIKKGNDCMALEHEMLHLLDQRGAQYPAEHNVGHLYEAKPALKQFYRKLDPTNSFNPGVGKTSKKKNWAE

SEQ ID NO: 103 - protein, 356 aa, Neisseria meningitidis
MTKHIAILRGDGIGPEIVAETVRVLDKLIAQGLDAGYEYAPLGGEAYDEYGHPYPEFTQNLCRKADAVLLGAVGSPQYDNLDRPLRPERGLLAIRKDLNLFANLRPAVLYPELANASTLKPEIVAGLDILIVRELTGDIYFGEPRGIRVLENGEREGYNTMKYSESEIRRIAHVAFQSAQKRSKKVCSVGKANVLETTELWREIFEEIGKEYPDVELSHMYVDNAAMQLVRAPKQFDVIATGNIFGDILSDEASMLTGSIGMLPSASLDENGKGLYEPSHGSAPDIAGQNKANPLATILSLAMLLRYSLNDEARAQQVENAVQKVLQQGLRTSDIYEEGTKLVSCSEMGDAVLAAL

SEQ ID NO: 104 - protein, 258 aa, Neisseria meningitidis
MAAFNTQKVLSVHHWTDAYFTFTCTRDESLRFENGQFVMVGLMVDGKPLMRAYSVASANWEEHLEFFSIKVQDGPLTSRLQHLKVGDDVLISKKPTGTLVAGDLNPGKHLYLLSTGTGIAPFLSITKDPEIYEQFEKIILVHGVRYKKDLAYYDRFTKELPEHEYLGDLVKEKLIYYPIVSREEFEHHGRLTDLMVSGKLFEDIGLPKINPQDDRAMLCGSPAMLKDTCKVLDDFGLTVSPKTGVRGDYLIERAFVDQ

SEQ ID NO: 105 - protein, 469 aa, Neisseria meningitidis
MKYISTRGETAHKPFSEVLLMGLAPDGGLMLPEHYPQIGRETLDKWRGLAYPELAFEIMRLFVTDIPEDDLRDILNRTYTEAAFGTKEITPVRTLSDGIKIQALSNGPTLAFKDMAMQFLGNAFEYVLNKEGKKLNILGATSGDTGSAAEYALRGKKGVNVFMLSPDGKMSAFQRAQMYSLQDENIHNIAVKGMFDDCQDIVKAVQNDAAFKEKYHIGTVNSINWGRIVAQVVYYFAGYFNATSSNDETVSFCVPSGNFGNVCAGHIAKQMGLPIRRLIVATNENDVLDEFFKTGAYRPRNSAHTYVTSSPSMDISKASNFERFVFDLMDRDPAEINTLWAEVAAGKGFDLRFALDKVGGKYGFTSGKSTHADRLATIKQVYEQDQELIDPHTADGVKVAREVREEGEMVVCLETALAAKFDATIREAVGDAAIPRPAALEGLENLPQRVQTVPNSADAVKGIIEQTLA

SEQ ID NO: 106 - protein, 272 aa, Neisseria meningitidis
MKKTVFTCAMIALTGTAAAAQELQTANEFTVHTDLSSISSTRAFLKEKHKAAKHISVRADIPFDANQGIRLEAGFGRSKKNIINLETDENKLGKTKNVKLPTGVPENRIDLYTGYTYTQTLSDSLNFRVGAGLGFESSKDSIKTTKHTLHSSRQSWLAKVHADLLSQLGNGWYINPWSEVKFDLNSRYKLNTGVTNLKKDINQKTNGWGFGLGANIGKKLGESASIEAGPFYKQRTYKESGEFSVTTKSGDVSLTIPKTSIREYGLRVGIKF

SEQ ID NO: 107 - protein, 517 aa, Neisseria meningitidis
MTQTNRVIIFDTTLRDGEQSPGAAMTKEEKIRVARQLEKLGVDIIEAGFAAASPGDFEAVNAIAKTITKSTVCSLSRAIERDIRQAGEAVAPAPKKRIHTFIATSPIHMEYKLKMKPKQVIEAAVKAVKIAREYTDDVEFSCEDALRSEIDFLAEICGAVIEAGATTINIPDTVGYSIPYKTEEFFRELIAKTPNGGKVVWSAHCHNDLGLAVANSLAALKGGARQVECTVNGLGERAGNASVEEIVMALKVRHDLFGLETGIDTTQIVPSSKLVSTITGYPVQPNKAIVGANAFSHESGIHQDGVLKHRETYEIMSAESVGWATNRLSLGKLSGRNAFKTKLADLGIELESEEALNAAFARFKELADKKREIFDEDLHALVSDEMGSMNAESYKFISQKISTETGEEPRADIVFSIKGEEKRASATGSGPVDAIFKAIESVAQSGAALQIYSVNAVTQGTESQGETSVRLARGNRVVNGQGADTDVLVATAKAYLSALSKLEFSAAKPKAQGSGTI

SEQ ID NO: 108 - protein, 376 aa, Neisseria meningitidis
MIKISTRFDAGSVVVKDLTDPSNIRLALRPDNASDFAQWFYFRLQGAAYQNCIMHFENAAEAAYPKGWEGYQACASYDRRNWFRVPTSYENGVLTVNHTPLSNSVYYAYFEPYSEEQHLNLLGDAQGSGLCRIDDLGSTVQGRDINLLTIGNQVESDLKIWITARQHPGETMAEWFIEGLLGRLLDPQDPTARALLDRATFYIVPNMNPDGSALGNLRTNAAGANLNREWENPTVEKSPEVFFVREKMLETGVDLFLDIHGDEGLPFVFVAGTEGVPNYNPRIAALEAQFKNALLNASPDFQDEYGYEKDAPGEANMTLATNWVGNRFNCLAYTLEMPFKDNANLPDDDFGWNGQRSLRLGEAALSAILNVIGDLR

SEQ ID NO: 109 - protein, 239 aa, Neisseria meningitidis
MATLSDKTILVTGASQGLGEQVAKAYAAAGATVILVARHQKKLEKVYDAIVEAGYPEPFAICFDLISAEEKEFEHFAATIAEATQGKLDGIVHCAGYFYALSPLDFQTVAEWVNQYRINTVAPMGLTRALFPLLKQSPDASVIFVGESHGETPKAYWGGFGASKAALNYLCKVAADEWERFGNLRANVLVPGPINSPQRIKSHPGEAKSERKSYGDVLPAFVWWASAESKGRSGEIVYL

SEQ ID NO: 110 - protein, 620 aa, Neisseria meningitidis
MALLQISEPGMSAAPHRHRLAAGIDLGTTNSLVATVRSGSAACLPDAEGRVTLPSVVRYLENGGIEVGKTALSAQKTDPLNTVSSAKRLIGRTLADLHQNTHYLPYRFGDNQRVIELHTRQGVKTPVEVSAEILKTLKSRAEETLGGDLVGVVITVPAYFDDAQRQATKDAARLAGLNVLRLLNEPTAAAIAYGLDNASEGTFVVYDLGGGTFDVSVLQLTKGLFEVKATGGNSALGGDDFDHRLFCRLLEQNGLSQLNEQDSQLLLSLVRAAKEQLTTQTEARIQATLSDGMAIDTSISRAEFHNLTQHLVMKTLEPVTQALKDAGVGKNEVKGVIMVGGSTRMLHVQQAVATFFGQTPLNNLNPDEVVALGAAIQANVLAGNKTDGEWLLLDVTPLSLGLETYGGLAEKIIPRNSTIPTARAQDFTTFKDGQTAMTIHVVQGERELVADCRSLAKFTLRGIPPMAAGAARIRVTFQIDADGLLSVSAQEQSTGVQAQIEVKPSYGLDDDTITQMLKDSMSNAAEDMAARARAEAVVEAESLTDAVNAALELDSDLLDAEELQQIRQGIADLQGRLKDGKAEDIRAAAAKLGSITDNFAAKRMNRNIQRALTGQSVDNI

SEQ ID NO: 111 - protein, 619 aa, Neisseria meningitidis
MPEYRSKTSTHGRNMAGARALWRATGVMETDFGKPIIAVANSFTQFVPGHVHLHNMGQLVAREIEKAGAIAKEFNTIAIDDGIAMGHSGMLYSLPSRDLIADSIEYMVNAHCADALVCISNCDKITPGMLIAAMRLNIPTIFVSGGPMEAGKVIGVANIQPERRLDLIDAMIESADDNVSNRQVEEVEQNACPTCGSCSGMFTANSMNCLTEALGLSLPGNGSYLATHAGRKELFLEAGRMIVEITKRYYEQNDETVLPRSIATKKAFENAMTMDIAMGGSTNTILHLLAVANEAGVDFKMADIDRLSRVVPCICKTAPNNHDYYMEDVHRAGGIFAILKELDKAGKLHTDVHTIHAPTLKDAIEQWDVTNPENTRAIERFKAAPGGVRTTQAFSQNRMWKTLDLDREKGCIRDVAHAYSQDGGLAVLFGNIAERGCVVKTAGVDESILKFTGRARVFESQEDAVEGILGNQIVAGDIVIIRYEGPKGGPGMQEMLYPTSYLKSKGLGKACALLTDGRFSGGTSGLSIGHASPEAAEGGAIGLVHEGDTVEIDIPNRSIHLAISDEELAARRAEMEARGSKAWKPKNRDRYVSAALRAYGAMATSADKGAVRDVAQIER

SEQ ID NO: 112 - protein, 487 aa, Neisseria meningitidis
MRIVEKAYTFDDVLLVPAHSTVLPRDVKLQTKLTREITLNLPLLSAAMDTVTEARLAISMAQEGGIGIIHKNMPPEMQARAVSKVKRHESGVVKDPVTVAPTTLIREVLEMRAQRKRKMSGLPVVENGKVVGIVTNRDLRFENRVDLPVSAIMTPRERLVTVPEGTSIDEARELMHTHKVERVLVLNEKDELKGLITVKDILKTTEFPNANKDSEGRLRVGAAVGTGGDTEERVKALVEAGVDVIVVDTAHGHSQGVIDRVRWVKETYPHIQVIGGNIATAKAALDLVAAGADAVKVGIGPGSICTTRIVAGVGVPQLTAIHNVAEALKGTGVPLIADGGIRFSGDIAKALAAGAYSVMLGGMFAGTEEAPGEIELYQGRSYKSYRGMGSLGAMSQGSADRYFQDKTDSTDKYVPEGIEGRVPYKGPIVNIIHQLTGGLRSSMGYLGCANIAEMHEKAEFVEITSAGMSESHVHDVQITKEAPNYHR

SEQ ID NO: 113 - protein, 157 aa, Neisseria meningitidis
MKGDRLVIRELNKNLGLLLVTINQYFLHARILKNWGFEELGEHFFKQSIVEMKAADDLIERILFLEGLPNLQELGKLLIGESTEEIIACDLTKEQEKHEALLAAIATAEAQQDYVSRDLLEKQKDTNEEHIDWLETQQELIGKIGLPNYLQTAAQED

SEQ ID NO: 114 - protein, 435 aa, Neisseria meningitidis
MKPVNIGLLGLGTVGGGTAAVLRDNAEEISRRLGREIRISAVCDLSEEKARQTCPSAAFVKDPFELVAREDVDVVVELFGGTGIAKDAVLKAIENGKHIVTANKKLLAEYGNEIFPLAEKQNVIVQFEAAVAGGIPIIKALREGLAANRIKSIAGIINGTSNFILSEMREKGSAFADVLKEAQALGYAEADPTFDIEGNDAGHKITIMSALAFGTPMNFSACYLEGISKLDSRDIKYAEELGYRIKLLGITRKTGKGIELRVHPTLIPESRLLANVNGVMNAVRVNADMVGETLYYGAGAGALPTASAVVADIIDIARLVEADTAHRVPHLAFQPAQVQAQTILPMDEITSSYYLRVQAKDEPGTLGQIAALLAQENVSIEALIQKGVIDQTTAEIVILTHSTVEKHIKSAIAAIEALDCVEKPITMIRMESLHD

SEQ ID NO: 115 - protein, 820 aa, Neisseria meningitidis
MTQKEKHFEEYAALATLPLRDVVVYPHMVLPLFVGRPKSIAALENAITREEPVFLLAQTDAAVEEPIAADLYQTGTVAQVLQVLKLPDGTVKVLVEGLYRGRVLTIEDTGGLFVSHIETVVEEDTGGNTDLEAVRRTLLAQFEQYAKLNKKIPAEIIGSINGIAENSRLTDTVAAHLQLKLAQRQQILEIPEIGKRMEFLLAQLESELDIMQAEKRIRGRVKRQMEKSQREYYLNEQIKAIHKELGEEDENGELDALEADIKKAGMTKEAEEKCLSELKKLKMMPPMSAESTVVRNYIDTLLELPWKKKSRVSKDIAKAGLVLDADHYGLEKVKERILEYLAVQKRMDKLKGPILCLVGPPGVGKTSLGESIAKATGRKYVRMALGGVRDESEIRGHRRTYIGSMPGKILQNMAKAGVKNPLFLLDEIDKLGNDFRGDPASALLEVLDPEQNNKFADHYAEVDYDLSDVMFIATSNSLNIPTPLLDRMEIIRLSGYTEDEKINIAMQYLVPKQMKRNGVKEGELAIEESAVRDIIRYYTREAGVRSLDREIAKICRKVVMQITLDEDKKRLSETKKTSKAKPKAVKVNEKNLHDYLGVRRFDYGVAESENRIGQVTGLAWTEVGGELLTVEAAALPGKGVIQCTGQLGDVMKESVSAAWSVVRSRAESVGLAPDFYEKKDIHIHVPEGATPKDGPSAGIAMTLAAVSAFTKIPVRADVAMTGEITLRGEVLPIGGLKEKLLAALRGGIKHVLIPKDNVKDLEEIPENVKTGLTIHPVKWIDEVLALGLESQPEPWAEPSGAEAAAESASKPKPRSRATKH

SEQ ID NO: 116 - protein, 542 aa, Neisseria meningitidis
MISTNGITMQFGAKPLFENVSVKFGEGNRYGLIGANGSGKSTFMKILGGDLEQTAGEVAIENGVRLGKLRQDQFAYEDMRVLDVVMMGHTEMWAAMTERDAIYANPEATEDDYMKAAELEAKFAEYDGYTAEARAAELLSGVGISEDLHNAKMAEVAPGFKLRVLLAQALFSKPDVLLLDEPTNNLDINTIRWLEGVLNQYDSTMIIISHDRHFLNEVCTHMADLDYNTITIYPGNYDDYMLASAQSRERALKDNAKAKEKLQELQEFVARFSANKSKARQATSRLKQADKIKSEMVEVKPSTRQNPYIRFEADEKAKLHRQAVEVEKLAKRFETQLFKNLNFILEAGQRLAIIGPNGAGKSTLLKLLAGAYNPEYSDGLLPDEGTIKWAEKASVGYYPQDHENDFDVDMDLSEWMRQWGQEGDDEQVIRGTLGRLLFGSNDVVKKVKVLSGGEKGRMLYGKLLLLKPNVLVMDEPTNHMDMESIESLNMALEKYNGTLIFVSHDRQFVSSLATQIIELDGKGGYEHYLGDYESYLEKKGVA

SEQ ID NO: 117 - protein, 344 aa, Neisseria meningitidis
MSTSLSYRDAGVDIDAGDQLVENIKPFAKRTMRPEVLGDLGGFGALVEIGKKYQNPVLVSGTDGVGTKLKLAFDWDKHDTVGIDLVAMSVNDILVQGAEPLFFLDYFACGKLDVPRATDVIKGIAQGCEESGCALIGGETAEMPGMYPVGEYDLAGFAVGVVEKENVITGRSIGVGDVVLGLASNGAHSNGYSLIRKIIERDNPDLDAEFDNGKTLREAVIAPTRLYVKPILAALEKFTIKGMAHITGGGITENVPRVLPENTVAQIDAKSWELPKLFQWLQKAGNVETQEMYRTFNCGIGMVVIVAAEDADAVQGLLGEQGETVYRLGLIRERQGDEHQTQVA

SEQ ID NO: 118 - protein, 561 aa, Neisseria meningitidis
MSMENFAQLLEESFTLQEMNPGEVITAEVVAIDQNFVTVNAGLKSESLIDVAEFKNAQGEIEVKVGDFVTVTIESVENGFGETKLSREKAKRAADWIALEEAMENGDILSGIINGKVKGGLTVMISSIRAFLPGSLVDVRPVKDTSHFEGKEIEFKVIKLDKKRNNVVVSRRAVLEATLGEERKALLENLQEGSVIKGIVKNITDYGAFVDLGGIDGLLHITDLAWRRVKHPSEVLEVGQEVEAKVLKFDQEKQRVSLGMKQLGEDPWSGLTRRYPQGTRLFGKVSNLTDYGAFVEIEQGIEGLVHVSEMDWTNKNVHPSKVVQLGDEVEVMILEIDEGRRRISLGMKQCQANPWEEFAANHNKGDKISGAVKSITDFGVFVGLPGGIDGLVHLSDLSWTESGEEAVRKYKKGEEVEAVVLAIDVEKERISLGIKQLEGDPFGNFISVNDKGSLVKGSVKSVDAKGAVIALSDEVEGYLPASEFAADRVEDLTTKLKEGDEVEAVIVTVDRKNRSIKLSVKAKDAKESREALNSVNAAANANAGTTSLGDLLKAKLSGEQE

SEQ ID NO: 119 - protein, 104 aa, Neisseria meningitidis
MTKSELMVRLAEVFAAKNGTHLLAKDVEYSVKVLVDTMTRSLARGQRIEIRGFGSFDLNHRPARIGRNPKTGERVEVPEKHVPHFKPGKELRERVDLALKENAN

SEQ ID NO: 120 - protein, 437 aa, Neisseria meningitidis
MMSVTVETLENLERKVVLSLPWSEINAETDKKLKQTQRRAKIDGFRPGKAPLKMIAQMYGASAQNDVINELVQRRFYDVAVAQELKVAGFPRFEGVEEQDDKESFKVAAIFEVFPEVVIGDLSAQEVEKVTASVGDAEVDQTVEILRKQRTRFNHVEREARNGDRVIIDFEGKIDGEPFAGGASKNYAFVLGASQMLPEFEAGVVGMKAGESKDVTVNFPEDYHGKDVAGKTAVFTITLNNVSEATLPEVDADFAKALGIADGDVAKMREEVQKNVSREVERRVNEQTKESVMNALLKAVELKAPVALVNEEAARLANEMKQNFVNQGMADAANLDLPLDMFKEQAERRVSLGLILAKLVDENKLEPTEEQIKAVVANFAESYEDPQEVIDWYYADPSRLQAPTSLAVESNVVDFVLGKAKVNEKALSFDEVMGAQA

SEQ ID NO: 121 - protein, 150 aa, Neisseria meningitidis
MQIILLEKIGGLGNLGDIVTVKNGYARNFLIPAGKAKRATEANMKEFEARRAELEAKQAEILADARVRQEKLDGQTVTVAQKAGVDGRLFGSVTNADIAAAIVAAGIEAVKANVRLPNGPLKAVGEYEVEVALHTDAVAKITVAVVAATE

SEQ ID NO: 122 - protein, 122 aa, Neisseria meningitidis
MRHYEIVFIVHPDQSEQVPAMVERYKTMIAEANGKIHRLEDWGRRQLAYPINKIHKAHYVLMNIETTPEVVEELETAFRFNDAILRHLTIKTKHAVTEASPMLGGEKAKNLLSGASEEAVAQ

SEQ ID NO: 123 - protein, 316 aa, Neisseria meningitidis
MSQHRKLIILGSGPAGYTAAVYAARANLNPVIITGIAQGGQLMTTTEVDNWPADADGVQGPELMARFLAHAERFGTEIIFDQINAVDLQKRPFTLKGDMGEYTCDALIVATGASAKYLGLPSEEAFAGKGVSACATCDGFFYKNQDVAVVGGGNTAVEEALYLANIAKTVTLIHRRSEFRAEKIMIDKLMKRVEEGKIILKLESNLQEVLGDDRGVNGALLKNNDGSEQQIAVSGIFIAIGHKPNTDIFKGQLEMDEAGYLKTKGGTADNVGATNIEGVWAAGDVKDHTYRQAITSAASGCQAALDAERWLGSQNI

SEQ ID NO: 124 - protein, 238 aa, Neisseria meningitidis
MTDTAENQTQNNWQAGHPRSIRSFVLRQSHMTAAQQRAIDTLWDSFGIDYQATPADLDARFGSSRPKILEIGFGMGTATAEIARRLPETDFLAIDVHGPGVGNLLKLIDENHLENIRVMRHDAVEVVENMLQDGSLDGIHIFFPDPWHKKRHHKRRLIQAPFIAKLLPKLKTGGYIHLATDWEEYAQQMLEVLSSFDSLQNTAADYAPTPDYRPETKFEARGKRLGHGVWDLVFKRIG

SEQ ID NO: 125 - protein, 570 aa, Neisseria meningitidis
MKASQFFISTLKEAPAEAALASHKLMIRAGLIKANASGLYTWMPMGLRVLRKVENVVREEMARAGSVELLMPVVQPAELWQESGRWEFYGKELLRLKDRHDRDFCMGPTCEEVIADIVRKEINSYKQLPKNFYHIQTKFRDEVRPRFGVMRAREFVMKDAYSFHADYASLQTTYQDMYDAYCRIFTRLGLAFRPVAADTGSIGGTGSHEFQVLAESGEDVIAYSDTSDYAANIELAPTLPLKGERAAAQAELVKVHTPNVKTIDSLVDFLSIPIEKTLKSIVVEGENEGELILLLLRGDHEFNDIKAEKLAGVKSPLTMASPAAIVEQFGANGGSLGPVGFAGKVYADFATEKGADWVIGANEDDYHYTGFNFGRDAAEPEFVDLRNVVEGDESPDGQGRLKLARGIEVGHVFQLRDKYTQAMNVSFLDNNGKSQIMEMGCYGIGITRVVAAAIEQNNDEKGIIWTKAMAPFEVVIVPMNYKKSDTVREAADKIYAELLAAGADVLLDDRDERAGVLLNDSELLGIPHRIVIGDRALKEGNVEYAERRDNEAQAVAIGEIVARVTASLNA

SEQ ID NO: 126 - protein, 887 aa, Neisseria meningitidis
MSTQLHDVDPIETQEWLDALSSVLEYEGGERAQYLLENLVKYCRDKGVRMPHGTTTPYLNTVSVENEKGIPGDQNIEHRIRAFVRWNAAAIVLRAGKKDLELGGHIASFQSAATMYEVGFNHFWKAKGEGEEGDLVFFQGHVAPGIYARAFVEGRLTEDQLNNFRQEVDGHGLPSYPHPHLLPDFWQFPTVSMGLGPIMAIYQARFLKYLESRGLAKTKGRKVWCFCGDGEMDEPESQGAIALAAREGLDNLIFVINCNLQRLDGPVRGNGKIIQELEGNFAGAGWNVVKVIWGRRWDRLLAKDKDGILRQRMEECLDGDYQTYKSKDGAYVREHFFNTPELKALVADMTDEQLWALNRGGHDPQKVYNAYDRAANHADGKPTVILAKTIKGYGMGASGEGQNVAHQAKKMDKASLKQFRDRFDIPVTDEQIESGDLPYLTFAPDTEEYKYLHARRDALGGYLPQRKPTQEVLEVPELSAFDAQLKSSGEREFSTTMAFVRILSTLLKDKKIGKRVVPIVPDESRTFGMEGMFRQYGIWNPKGQQYTPQDKDQLMFYKESVDGQILQEGINEPGAMADWIAAATSYANSNFAMIPFYIYYSMFGFQRIGDLAWAAGDMHARGFLLGGTAGRTTLNGEGLQHEDGHSHIQADLIPNCVSYDPTFQYEVAVIVQDGLRRMYANNEDVFYYITLMNENYTHPDMPEGAEQDILKGMYLLKAGGKGDKKVQLMGSGTILQEVIAGAELLKADFGVEADIWSCPSFNLLHRDAVEVERFNRLHPLEAEKVPFVTSQLQGHDGPVIAATDYIRSYADRIRAYIPNDYHVLGTDGFGRSDSRANLRRFFEVDRYNVAVAALAALAEQGKVSKETVQQAIEKYGIKADSAPSWKR

SEQ ID NO: 127 - protein, 535 aa, Neisseria meningitidis
MSIVEIKVPDIGGHENVDIIAVEVKAGDTIAVDDTLITLETDKATMDVPADAAGVVKEVKVKVGDKISEGGVILTVETGAAAAEAAPAAAEAQPAPAAAPAAAGGATVQVAVPDIGGHTDVDVIAVEIKVGDTVAEDDTLITLETDKATMDVPCTAAGVVKAVFLKVGDKVSEGSAIIEVETVGSAAAAPAQAAQAAAPAAAPPPTAAAAPAAAPAPSAPAAAKIDEAAFAKAHAGPSARKLARELGVDLGQVKGTGLKGRIMGDDIKAFVKSVMQGGAAKPAAASASLGGGLDLLPWPKVDFSKFGNVEVKELSRIKKISGQNLSRNWVVIPHVTVHEEADMTELEEFRKQLNKEWEREGVKLSPLAFIIKASVSALKAFPEFNASLDGDNLVLKNYFNIGFAADTPNGLVVPVIKDVDQKGLKQISQELTELSKKAREGKLKPQEMQGACFTISSLGGIGGTGFTPIVNAPEVAILGVCKSQIKPVWNGKEFAPRLMCPLSLSFDHRVIDGAAGMRFTVFLAKLLKDFRRITL

SEQ ID NO: 128 - protein, 145 aa, Neisseria meningitidis
MGNFLYRGISCQQDEQNNGQLKPKGNKAEVAIRYDGKFKYDGKATHGPSVKNAVYAHQIETGLYDGCYISTTTDKEIAKKFATSSGIENGYIYVLNRDLFGQYSIFEYEVEHPENPNEKEVTIRAEDCGCIPEEVIIAKELIEIN

SEQ ID NO: 129 - protein, 594 aa, Neisseria meningitidis
MALVELKVPDIGGHENVDIIAVEVNVGDTIAVDDTLITLETDKATMDVPAEVAGVVKEVKVKVGDKISEGGLIVVVEAEGTAAAPKAEAAAAPAQEAPKAAAPAPQAAQFGGSADAEYDVVVLGGGPGGYSAAFAAADEGLKVAIVERYKTLGGVCLNVGCIPSKALLHNAAVIDEVRHLAANGIKYPEPELDIDMLRAYKDGVVSRLTGGLAGMAKSRKVDVIQGDGQFLDPHHLEVSLTAGDAYEQAAPTGEKKIVAFKNCIIAAGSRVTKLPFIPEDPRIIDSSGALALKEVPGKLLIIGGGIIGLEMGTVYSTLGSRLDVVEMMDGLMQGADRDLVKVWQKQNEYRFDNIMVNTKTVAVEPKEDGVYVTFEGANAPKEPQRYDAVLVAAGRAPNGKLISAEKAGVAVTDRGFIEVDKQMRTNVPHIYAIGDIVGQPMLAHKAVHEGHVAAENCAGHKAYFDARVIPGVAYTSPEVAWVGETELSAKASGRKITKANFPWAASGRAIANGCDNGFTKLIFDAETGRIIGGGIVGPNGGDMIGEVCLAIEMGCDAADIGKTIHPHPTLGESIGMAAEVALGTCTDLPPQKKK

SEQ ID NO: 130 - protein, 261 aa, Neisseria meningitidis
MNPFLNTAFKAARRAGQMMIRAAGNLDAVKTDSKAFNDFVSDVDRNSEIILVEALKEAYPHHKITCEESGSHGKAAAEYEWIIDPLDGTTNFLHGHPQYAISMALLHKGVLQEALVYAPERNDVYMASRGKGALLNDRRIRVSNRIELNRCLIGTGFPVVDQSMMDKYLAILKDFLAKTAGGRREGAASLDLCAVATGRFDGFFEFNLKPWDIAAGALIVQEAGGIVTDMSGEDGWLESGDIVAANPKVLAQMLKIISAHV

SEQ ID NO: 131 - protein, 481 aa, Neisseria meningitidis
MTQYTLKQASVLLQSKQISAVELASAYLAAIAEKNPALNGYITIDQDKTLAEARAADERIAQGNASALTGVPVAYKDIFCQTGWRSACASKMLDNFISPYTATVVQNLLDEGMVTLGRTNMDEFAMGSTNENSFYGAAKNPWNLEHVPGGSSGGSAAVVAARLAPAALGSDTGGSIRQPASHCGITGIKPTYGTVSRFGMVAYASSFDQTGPMAQTAEDCAILLNAMAGFDPKDSTSLEREKEDYTRDLNQPLKGLKIGLPKEYFGEGNSADVLTALQNTIDLLKAQGAELIEVSLPQTKLSIPAYYVLASAEASTNLSRYDGVRYGHRAAQFADLEEMYGKTRAEGFGSEVKRRIMIGTYVLSHGYYDAYYLKAQKLRRLVADDFQTAFARCDLILAPTAPTAAPKIGADASPVETYLSDIYTIAVNLAGLPALTLPAGFSGGGLPVGVQLVGNYFAEAKILGAAHQIQLNSDWHGKRPE

SEQ ID NO: 132 - protein, 476 aa, Neisseria meningitidis
MTWETVIGLEIHVQLNTKSKIFSGASTAFGAEPNAHASVVECALPGVLPVMNREVVEKAIKLGLALDAKINQKNVFDRKNYFYPDLPKGYQISQLDLPIVEHGKLEIVVGDDVKTINVTRAHMEEDAGKSVHEGLNGATGIDLNRAGTPLLEVVSEPEMRSAAEAVAYAKALHSLVTWLDICDGNMAEGSFRVDANVSVRPKGQEEFGTRREIKNLNSFRFLEQAINYEAEAQIEILEDGGKVQQATMLFDPEKGETRVMRLKEDAHDYRYFPDPDLLPVIISDAQMQKAKAEMPELPKEMAARFVADYGVSEYDARLLTASRAQAAYFEEAAKESGQGKLTANWMNGELAAALNKEGMELADSPITAPRLAALVGKIADGTLSSKLAKKAFEAMWAEPEATIAEIIEKHGLQQMTDTGEIEAMVDEVLANNAKAVEQFKSGNEKALNAIVGQVMKASKGKANPAQVQELIKAKLA

SEQ ID NO: 133 - protein, 414 aa, Neisseria meningitidis
MSNENRTCSFCGKSKSHVKHLIEGENAFICDECVSNCIEILHEDGNDGTPSESAGGEPEESGKLPTPAEIVANLNDHVIGQEQAKKALAVSVYNHYKRLRHPKAGANVELSKSNILLIGPTGSGKTLLAQSLARKLDVPFVMADATTLTEAGYVGEDVEQIITKLLGKCDFDVEKAQRGIVYIDEIDKISRKSDNPSITRDVSGEGVQQALLKLIEGTVASVPPQGGRKHPNQEFINVDTTNILFICGGAFAGLEKVIRQRTEKGGIGFGASVHSKDENADITKLFGIVEPEDLIKFGLIPELIGRLPVIATLEELDEDALINILTEPKNALVKQYQALFGMENVELEFEEGALRSIARQAMERKTGARGLRSIVERCLLDTMYRLPDLKGLKKVVVGKAVIEEGREPELVFES

SEQ ID NO: 134 - protein, 404 aa, Neisseria meningitidis
MTVKTPVYLDYAATPPVDKRVAEKMIPYLTETFGNPASNSHSFGWEAEEAVEKARADIAALINADSKEIVFTSGATESNNLAIKGAAHFYKSKGNHLITVKTEHKAVLDTMRELERQGYEVTYLDVQENGLVDLDVLKAAIREDTILVSVMWVNNEIGVVQDIPAIGEICRERKIIFHVDAAQACGKVPVDVEAAKVDLLSMSGHKVYGPKGIGALYVRRKPRVRLEAQMHGGGHERGFRSGTLPTHQIVGMGEAFRIAKEELAQDTAHYLKLRDIFLKGIEGIEEVYINGDLEHRVPNNLNVSFNFVEGESLIMAVKELAVSSGSACTSASLEPSYVLRALGRNDELAHSSLRITFGRMTTEEEVQFAAELIKSKIGKLRELSPLWEMFKDGIDLNSIEWAAH

SEQ ID NO: 135 - protein, 328 aa, Neisseria meningitidis
MSSTPNKQAGYPRLVADIGGTNARFALETAPRVIEKAAVLPCKDYDTVTDAVRAYLNQSGATAVRHAAFAIANPILGDWVQMTNHHWAFSIETTRQTLGLDTLILLNDFTAQALAVTQTSSKDLMQVGGQKPVEFAPKAVIGPGTGLGVSGLVHSHAGWVALAGEGGHTSFPPFDDMEVLIWQYAKNKYGHVSAERFLSGAGLSLVYEALAAKQKAKPAKLMPSEITEKALSGASPLCRQTLDIFCAMLGTVASNLALTLGARGGVYLCGGIIPRVLEYFKTSPFRSRFENKGRFEAYLAAIPVYVVLSEFPGISGAAAALDNHLRNV

SEQ ID NO: 136 - protein, 481 aa, Neisseria meningitidis
MSTQTNFDLVLFGATGDLAMRKLLPCLYQAHVAGLLHPEGRILGVSRSELDTEGFLAKVETSSKIHVKENFSDEAWASFVERFAYLKVDVTQPDDFAALGDLVKARKETDNVVIYLSTAPKFFAQACENLAAIGLNADNVRVVLEKPLGTDLASSQQINTDVARYFKEGQIYRIDHYLGKESLQNLLALRFANVMFEPLWNNKYIESVQLTIAEQLGVEERGEFYDITGALRDMVQNHLMQMLCMTAMEAPASLDADAVRDEKVKVIKSLKPLTVESVNENVVRGQYTAARGMNGYLEEINVPQDSFTETYVAIKAEIENERWKGVPFYLRTGKRMAGKVAEIVLNFKDLNSHIFEGSRTAPNRLVIELQPYESVRLYTQMKTPGAGNKVETVPLATDLGKALEGRRAEAYERLLLDVINGKLALFNRRDELEAAWEYVMPILENWTNNTTPPHGYGAHSWGPEAARELLARDGHKWHEEQ

SEQ ID NO: 137 - protein, 503 aa, Neisseria meningitidis
MSEQNHPQTEPQLDENQIIALRREKLHNIRQQRNAYPNDFKRDSFAADLHAQYGEIGKEELDPQGIPVKVAGRMMLKRQMGKASFATIQDVSGQIQLYLNNKGVSQEVLDDFNHWDLGDIVGAEGTLFKTNHGELTVRVSGIRLLSKSLRPLPDKHKGLSDQETKYRQRYVDLIANEESRNTFIKRSQIIQSVRNFMVGEHYLEVETPMMHPIPGGATAKPFVTHHNALDIPLYLRIAPELYLKRLVVGGLERVFEINRSFRNEGMSVRHNPEFTMIEFYEAFSDYERMMQMAEDIIRNASRTVNGTANITYNGKEVDLESPFERLTILEAIKKYNPHYTDEQLNDAEWLKKEIVKHGESLPPSPGIGSLQLALFEGCAEGKLWNPTFIVDYPVEVSPLARASDTKQGLTERFELFVVGRELANGYSELNDPEDQAERFKAQVVQKDAGDDEAMHYDADYIRAMEFGLPPTGGCGIGIDRLVMLLTDSQTIRDVILFPQMRPE

SEQ ID NO: 138 - protein, 392 aa, Neisseria meningitidis
MRKKLTALVLSALPLAAVADVSLYGEIKAGVEGRNYQLQLTEAQAANGGASGQVKVTKVTKAKSRIRTKISDFGSFIGFKGSEDLGDGLKAVWQLEQDVSVAGGGATQWGNRESFIGLAGEFGTLRAGRVANQFDDASQAIDPWDSNNDVASQLGIFKRHDDMPVSVRYDSPEFSGFSGSVQFVPIQNSKSAYTPAYYTKNTNNNLTLVPAVVGKPGSDVYYAGLNYKNGGFAGNYAFKYARHANVGRNAFELFLIGSGSDQAKGTDPLKNHQVHRLTGGYEEGGLNLALAAQLDLSENGDKTKNSTTEIAATASYRFGNAVPRISYAHGFDFIERGKKGENTSYDQIIAGVDYDFSKRTSAIVSGAWLKRNTGIGNYTQINAASVGLRHKF

SEQ ID NO: 139 - protein, 348 aa, Neisseria meningitidis
MSDDKSKALAAALAQIEKSFGKGAIMKMDGSQQEENLEVISTGSLGLDLALGVGGLPRGRIVEIFGPESSGKTTLCLEAVAQCQKNGGVCAFVDAEHAFDPVYARKLGVKVEELYLSQPDTGEQALEICDTLVRSGGIDMVVVDSVAALVPKAEIEGDMGDSHVGLQARLMSQALRKLTGHIKKTNTLVVFINQIRMKIGVMFGSPETTTGGNALKFYSSVRLDIRRTGSIKKGEEVLGNETRVKVIKNKVAPPFRQAEFDILYGEGISWEGELIDIGVKNDIINKSGAWYSYNGAKIGQGKDNVRVWLKENPEVANEIDAKIRALNGVEMHITEGTQDETDGERPEE

SEQ ID NO: 140 - protein, 379 aa, Neisseria meningitidis
MQNIFDPLVIRGKSLTPIVQGGMGVGVSASGLSSAVARENGIGTIASVDLRHLHEDLLAESQINPSEEKYTSLNCTALDREIQKAKSASEGKGLIAVNVMKAVKDHAAYVRQACESGADAVVMGAGLPLDLPEMTEGYHKDVALLPILSESRGINIVLKRWMKKGILPDAIVVEHPAHAAGHLGASTVEGVNDAKFDFKRVIEETFEVFKSLGLESEKIPLILAGGMANFEKVKTALKNWGASAVQIGTAFAVTEEGDAHLNFKKTLAGAETEKVVEFMSVAGLPARGVRTKFLDSYIKRESKLQTNAKADPRRCTQGLNCLTSCGLRDGLSKAGQFCIDIQLAAAFRGEVDKGLFFRGKDRCPSAMPSAPSARRYNIC

SEQ ID NO: 141 - protein, 659 aa, Neisseria meningitidis
MSQLANAIRFLSADAVQKANSGHPGAPMGMAEMAETLWTKFLNHNPANPKFYNRDRFVLSNGHASMLLYSLLHLTGYNLSIEDLKNFRQLHSKTPGHPEYGYTDGVETTTGPLGQGIANAVGMALAEKILAAEFNKDGLNIVDHYTYVFMGDGCLMEGVSHEACSLAGTLGLGKLIVLYDDNNISIDGKVDGWFTENIPQRFESYGWHVVPNVNGHDTAAIQAAIEAARAETGKPSIICCKTLIGKGSANKEGSHKTHGAPLGADEIEATRKHLGWTYPAFEIPQEIYDAWNAKEQGAKLEADWNELFAQYQAKYPAEAAEFVRRMDKKLPDNFDEYVQAALKEVCAKAETIATRKASQNSIEILAKELPELVGGSADLTPSNLTDWSNSVSVTRDKGGNYIHYGVREFGMGAIMNGLVLHGGVKPFGATFLMFSEYERNALRMAALMKINPVFVFTHDSIGLGEDGPTHQPIEQTATLRLIPNMDVWRPCDTAESLVAWAEAVKAADHPSCLIFSRQNLKFQARSEQQLNDIKRGGYVISEAQGNAQAVIIATGSEVELALEAQKALAAQNIAVRVVSMPSTNVFDRQDAAYQAAVLPEGLPRIAVEAGHADGWYKYVGLNGAVVGINRFGESAPADLLFKAFGFTVDNVVDTVKSVL

SEQ ID NO: 142 - protein, 336 aa, Neisseria meningitidis
MSKKRVLTGVTTTGIPHLGNYVGAIRPAVRAAQNLDTESFLFLADYHGIIKCHEPEMIHQSTQAVAATWLACGLDPERTTFYRQSDTPEVMELNWILTCITAKGLMNRAHAYKAAVQANAENGQEDPDFGVEMGLFSYPILMTADILMFNANEVPVGRDQIQHVEMARDIAGRFNHRFRELFTLPEVKIDENVELLVGLDGRKMSKSYGNTIPLWENDKKTQKSVNKIITNMKEPGEPKQPDESPLFEIYKAFSTPSETVEFTKMLADGLAWGEAKKLLAAKINAELAEPRERYNELTADPSQIEEILQAGAAKARKEARELLDKVRDAVGIRPLK

SEQ ID NO: 143 - protein, 859 aa, Neisseria meningitidis
MRYDKLTAKFQQALAEAQSLALAADGSYLEAGFVLKALLDDQNSGAAALLAHAGVNVPQVKQRLQQHLNSLPKVSGQGGDILPSRELQAVLNLMDKAATKRSDAYIASELFLLALVQQNDATGKILKEAGATEQNINAAIDAVRGGQNVNDANAEDQRDALKKYTLDLTQRARDGKLDPVIGRDDEIRRAIQVLQRRTKNNPVLIGEPGVGKTAIVEGLAQRIVNGEVPESLRNKRLLVLDLAALIAGAKYRGEFEERLKGVLNDLAKDDGNTLIFIDEIHTLVGAGKTDGAMDAGNMLKPALARGELHCIGATTLDEYRQYIEKDAALERRFQKVLVGEPSVEDTIAILRGLQERYEIHHGIDITDPAIVAAAELSDRYITDRFLPDKAIDLIDEAASRVKMEKETKPEAMDKIDRRLIQLRMEKAHVEKEKDDASKKRLELIDEEINGLQKEYADLDEIWKAEKAISDGAANIKKQIDEVKIKIEQAKRQGDLALASKLMYEDLEHLEKQRAAAERADTDSTKPANKLLRNNVGAEEIAEVVSRMTGIPVSKMMEGERDKLLKMEEVLHRRVVGQDEAVRAVSDAIRRSRSGLADPNKPYGSFLFLGPTGVGKTELCKALAGFLFDSEDHLIRIDMSEYMEKHAVARLIGAPPGYVGYEEGGYLTEQVRRKPYSVILLDEVEKAHPDVFNILLQVLDDGRLTDGQGRTVDFKNTVIVMTSNIGSQHIQQMGIQDYEAVKEVVMEDVKEHFRPEMINRIDEVVVFHGLDQDNIRNIAKIQLKGLEKRLEKQNLRLAVSDAALDIIAKAGFDPIYGARPLKRAIQSEIENPLAKALLAGNYAPESEIRVEADGDRLKFA

SEQ ID NO: 144 - protein, 572 aa, Neisseria meningitidis
MNLHQTVEHEAAAAFAAAGIADSPIVLQPTKNAEHGDFQINGVMGAAKKAKQNPRELAQKVAEALADNAVIESAEVAGPGFINLRLRPEFLAQNIQTALNDARFGVAKTDKPQTVVIDYSSPNLAKEMHVGHLRSSIIGDSISRVLAFMGNTVIRQNHVGDWGTQFGMLVAYLVEQQKDNAAFELADLEQFYRAAKVRFDEDPAFADTAREYVVKLQGGDETVLALWKQFVDISLSHAQAVYDTLGLKLRPEDVAGESKYNDDLQPVVDDLVQKGLAVEDDGAKVVFLDEFKNKEGEPAAFIVQKQGGGFLYASTDLACLRYRIGRLKADRLLYVVDHRQALHFEQLFTTSRKAGYLPENVGAAFIGFGTMMGKDGKPFKTRSGDTVKLVDLLTEAVERATALVKEKNPELGADEAAKIGKTVGIGAVKYADLSKNRTSDYVFDWDAMLSFEGNTAPYLQYAYTRVQSVFRKAGEWDANAPTVLTEPLEKQLAAELLKFEDVLQSVADTAYPHYLAAYLYQIATLFSRFYEACPILKAEGASRNSRLQLAKLTGDTLKQGLDLLGIDVLDVM

SEQ ID NO: 145 - protein, 398 aa, Neisseria meningitidis
MSQKLILVLNCGSSSLKGAVLDNGSGEVLLSCLAEKLNLPDAYITFKVNGEKHKVDLSAHPDHTGAVEALMEELKAHGLDSRIGAIGHRVVSGGELYSESILVDDEVIAGIEKCIPLAPLHNPAHLLGLRAAQSIFKGLPNVVVFDTSFHQTMPEVAYKYAVPQELYEKYGLRRYGAHGTSYRFVADETARFLGKDKKDLRMVIAHLGNGASITAVANGESRDTSMGLTPLEGLVMGTRSGDIDPSVFGFLAENANMTIAQITEMLNKKSGLLGISGLSNDCRTIEEEAAKGHKGAKLALDMFIYRLAKYIGSMAVAAGGLDALVFTGGIGENSDIIRERVIGYLGFLGLNIDQEANLKARFGNAGVITTADSKAVAVVIPTNEELMIAHDTARLSGL

SEQ ID NO: 146 - protein, 183 aa, Neisseria meningitidis
MKAYLALISAAVIGLAACSQEPAAPAAEATPAAEAPASEAPAAEAAPADAAEAPAAGNCAATVESNDNMQFNTKDIQVSKACKEFTITLKHTGTQPKASMGHNLVIAKAEDMDGVFKDGVGAADTDYVKPDDARVVAHTKLIGGGEEASLTLDPAKLADGEYKFACTFPGHGALMNGKVTLVD

SEQ ID NO: 147 - protein, 916 aa, Neisseria meningitidis
MLTNIAKKIFGSRNDRLLKQYRKSVARINALEEQMQALSDADLQAKTAEFKQRLADGQTLDGILPEAFAVCREASRRTLGMRHFDVQLIGGMVLHDGKIAEMRTGEGKTLVATLAVYLNALAGKGVHVVTVNDYLASRDAGIMEPLYNFLGLTVGVIISDMQPFDRQNAYAADITYGTNNEFGFDYLRDNMVTDQYDKVQRELNFAVVDEVDSILIDEARTPLIISGQADDNIQLYQIMNTVPPHLVRQETEEGEGDYWVDEKAHQVILSEAGHEHAEQILTQMGLLAENDSLYSAANIALMHHLMAALRAHSLFHKDQHYVIQDGEIVIVDEFTGRLMSGRRWSEGLHQAVEAKEGVEIKRENQTLASITFQNYFRLYTKLSGMTGTADTEAFEFQSIYNLETVIIPTNRPVQRKDFNDQIFRSAEEKFEAVVKDIEECHKRGQPVLVGTTSIENSELVSKLLTQAGLPHNVLNAKEHEREALIVAQAGKVGAITVATNMAGRGTDIVLGGNLKHQTDAIRADETLSDEEKQAQIAALEDGWQAEHDKVMEAGGLHIIGTERHESRRIDNQLRGRSGRQGDPGSSRFYLSFEDPLLRLFALDRAAAILNRLAPERGVAIEHNLLTRQIEGAQRKVEGRNFDMRKQVLEYDDVANEQRKVIYSQRNEILTSKDISDLMQEIRSDVVSDLVDTYMPPDSMEEQWDIPTLENRLAAEFRLHEDIQSWLKADNAIDGQDIKERLIERIENEYAAKTELVGKQAMADFERNVMLQVIDNQWREHLAAMDYLRQGIHLRSYAQKNPKQEYKREAFTMFQDLWNGIKFHIASLLTSVQIEQNPVAVVEEQPIGNIQSIHSESPDMEELLGQSQTDLVTEAFNPDGTDFSPEALEARGQIVHRNDPCPCGSGLKYKQCHGKLA

SEQ ID NO: 148 - protein, 562 aa, Neisseria meningitidis
MLNKDQFADNHFIRTIIEEDLESGKHTAVQTRFPPEPNGYLHIGHAKSICLNFGLAYIYDGLCNLRFDDTNPEKENDEYVNAIKEDVEWLGFHWAGEPRFASNYFDQLYDYAVGLIKDGKAYVDDLTPEEMREYRGTLTEAGKNSPYRDRSVEENLDLFTRMKNGEFPDGSKTLRLKIDMASGNINMRDPVIYRIRRAHHHNTGDKWCIYPMYDYTHCISDAIEGITHSLCTLEFEAHRPLYDCVLDNIPAPHATRPRQYEFSRLELLYTITSKRKLNQLVVEKHVSGWDDPRMPTISGMRRRGYTPEGLRLFAKRAGISKSENIVDMSVLEGAIREELENSAPRLMAVLNPLKVTLTNFETGRTQSRRAAFHPNHEEMGEREVPISQTIYIEADDFAENPPKGFKRLIPGGEVRLRHGYVIKCDEVVKDEAGNVVELKCSIDHDTLGKNPEGRKVKGVIHWVSAEHAAEIKVRLYDRLFTVERPDAVRGEDGEYLPFTDFLNPESVKEITAYAEPAAKDLPAESRWQFERIGYFVTDRKDHGKDTPVFNRTVTLKDSWQPK

SEQ ID NO: 149 - protein, 861 aa, Neisseria meningitidis
MLEAYRKAAAERAALGIPALPLNAQQTADLVELLKSPPAGEGEFLVELLAHRVPPGVDDAAKVKASFLAAVAEGSASSPLISPEYATELLGTMLGGYNIHALIELLDDDKLASIAAKGLKHTLLMFDSFHDVQEKAEKGNKYAQEVLQSWADAEWFASRAKVPEKITVTVFKVDGETNTDDLSPAPDAWSRPDIPLHALAMLKNPRDGITPDKPGEVGPIKLLEELKAKGHPVAYVGDVVGTGSSRKSATNSVIWHTGEDIPFVPNKRFGGVCLGGKIAPIFFNTQEDSGALPIEVDVSALKMGDVVDILPYEGKIVKNGETVAEFELKSQVLLDEVQAGGRINLIIGRGLTAKAREALKLPASTAFRLPQAPAESKAGFTLAQKMVGRACGLPEGQGVRPGTYCEPRMTTVGSQDTTGPMTRDELKDLACLGFSADMVMQSFCHTAAYPKPVDVKTHKELPAFISTRGGVSLRPGDGVIHSWLNRLLLPDTVGTGGDSHTRFPIGISFPAGSGLVAFAAATGVMPLDMPESVLVRFSGKLQPGVTLRDLVNAIPLYAIKQGLLTVAKAGKKNIFSGRILEIEGLPDLKVEQAFELTDASAERSAAGCTVKLNKEPIIEYMKSNVVLMKNMIANGYQDPRTLERRIKAMEKWLANPELLEADKDAEYAAVIEINMDDIKEPIIACPNDPDDVCFMSERSGTKIDEVFIGSCMTNIGHFRAASKLLEGKADTPVRLWIAPPTKMDAKQLSDEGHYGVLGRAGARMEMPGCSLCMGNQAQVREGATVMSTSTRNFPNRLGKNTFVYLGSAELAAICSKLGKIPTVEEYQANIGIINEQGDKIYRYMNFNEIDSYNEVAETVNV

SEQ ID NO: 150 - protein, 337 aa, Neisseria meningitidis
MQVYYDKDADLSLIKGKTVAIIGYGSQGHAHAANLKDSGVNVVIGLRQGSSWKKAEAAGHVVKTVAEATKEADVVMLLLPDETMPAVYHAEVTANLKEGATLAFAHGFNVHYNQIVPRADLDVIMVAPKGPGHTVRSEYKRGGGVPSLIAVYQDNSGKAKDIALSYAAANGGTKGGVIETTFREETETDLFGEQAVLCGGVVELIKAGFETLTEAGYAPEMAYFECLHEMKLIVDLIFEGGIANMNYSISNNAEYGEYVTGPEVVNASSKEAMRNALKRIQTGEYAKMFIQEGNVNYASMTARRRLNADHQVEKVGAQLRAMMPWITANKLVDQDKN

SEQ ID NO: 151 - protein, 575 aa, Neisseria meningitidis
MQLSGAQIIVQSLKAEGVEYVFGYPGGAVIEIYDALFQLNKFKHILTRHEQAAVHAADAYARVSGKVGVALVTSGPGVTNALTGIATAYTDSIPMVVISGQVGNSLIGTDAFQEVDTVGITRPCVKHNFLVTDINELAETIKKAFQIAASGRPGPVVVDVPKDVTQAMAKFSYPQEDIFIRSYQPVVQGHIGQIKKAVQMLASAKRPVVYFGGGVVLGNASEELTRFVRMTGAPCTGTLMGLGAYPSGDRQFLGMLGMHGTYEANLAMQNADVVLAVGARFDDRVVSVPSKFFEKAKKVIHIDVDPSSIAKRVKVDIPIVGDVKNVLSEMVALWQKQESVPSEDALGKWWKTIEEWRSRDCLWFDNGSEIIKPQYVIQKLAEITGNSAIITSDVGQHQMFAAQYYPFERPRQWLNSGGLGTMGVGLPYAIGAKLAAPDQDVFCITGDGSIQMNIQELSTCFQYRIPVNVITLNNGYLGMVRQWQEIYYGGRESETYFDSLPDFVKLAEAYGHIGIRVDKKSDVEGALLEALNQKDRLVFIDFLTDQKQNVMPMVGNGKGLDEMVLPPHMRADGKA

SEQ ID NO: 152 - protein, 429 aa, Neisseria meningitidis
MKKLNTQSPDFQAGLKALLAFETAQNPETERIVADICADVQKRGDAALIEYTNKFDQTNAKSIDDLILTQADLNAAFERIPNDVQTALQTAARRVESYHQRQKMESWSYTDEDGTLLGQQITPLDRVGIYVPGGKAAYPSSVIMNAMPAHVAGVKEIIMVVPTPKGERNDIVLAAAYVAGVTKVFTVGGAQAVAALAYGTETIPQVDKITGPGNAFVAAAKRRVFGVVGIDMVAGPSEILVIADGTTPADWVAMDLFSQAEHDEIAQAILIGTSQAYLDEVEAAMDRLIETMPRRDIIEASLGNRGAMILAKDLDEACEIANYISPEHLELSVENPQEWAKKIRHAGAIFMGRYTGESLGDYCAGPNHVLPTSRTARFSSPLGTYDFQKRSSLIQVSEQGAQKLGETASVLAHGESLTAHARAAEFRMK

SEQ ID NO: 153 - protein, 305 aa, Neisseria meningitidis
MNLTKTQRQLHNFLTLAQEAGSLSKLAKLCGYRTPVALYKLKQRLEKQAEDPDARGIRPSLMAKLEKHTGKPKGWLDRKHRERTVPETAAESTGTAETQIAETASAAGCRSVTVNRNTCETQITVSINLDGSGKSRLDTGVPFLEHMIDQIARHGMIDIDISCKGDLHIDDHHTAEDIGITLGQAIRQALGDKKGIRRYGHSYVPLDEALSRVVIDLSGRPGLVYNIEFTRALIGRFDVDLFEEFFHGIVNHSMMTLHIDNLSGKNAHHQAETVFKAFGRALRMAVEHDPRMAGQTPSTKGTLTA

SEQ ID NO: 154 - protein, 874 aa, Neisseria meningitidis
MKTSELRQKFLKFFETKGHTVVRSSSLVPHDDPTLLFTNAGMNQFKDVFLGFDKRPYSRATTAQKCVRAGGKHNDLENVGYTARHHTFFEMMGNFSFGDYFKRDAIHFAWEFLTSPEWLNIPKDKLLATVYAEDDEAYNIWLNEIGMPSERIVRIGDNKGAKYASDNFWQMGDTGPCGPCSEIFYDHGEEIWGGIPGSPEEDGDRWIEIWNCVFMQFNRDEQGNMNPLPKPSVDTGMGLERIAAVMQHVHSNYEIDLFQDLLKAVARETGAPFRMEEPSLKVIADHIRSCSFLIADGVLPSNEGRGYVLRRIIRRAVRHGYKLGQSKPFFHKLVADLVKEMGGAYPELKEKQAQIEEALKNEESRFAQTLETGMALLENALVKGGKTLGGEIIFKLYDTYGFPYDLTADICRERNIEPDEAGFEREMEAQRARARAAQSFKANAQLPYDGQDTEFKGYSERQTESKVLALYKDGEQVNELNEGDSGAVVIDFTPFYAESGGQVGDVGYIFSGENRFEVRDTQKIKAAVFGQFGVQTSGRLKVGDSVTAKVDDEIRNANMRNHSATHLMHKALRDVLGRHVEQKGSLVTAESTRFDISHPQAVTAEEIAEVERRVNEAILANVAVNAAIMSMEDAQKTGAMMLFGEKYGEEVRVLQMGGFSTELCGGTHVSRTGDIGLFKIISEGGIAAGVRRIEAITGLNALKWAQEQERLVKDIIAETKAQTEKDVLAKIQAGAAHAKALEKELARAKAELAVHAGAKLLDDAKDLGAAKLVAAQIEADAAALREIVTDLTGKSDNAVILLAAVNDGKVSLCAGVSKPLTGKVKAGDLVKFAAEQVGGKGGGRPDLAQAGGTDADKLPAVLDSVKDWVGAKLV

SEQ ID NO: 155 - protein, 227 aa, Neisseria meningitidis
MELVFIRHGQSEWNAKNLFTGWRDVKLSEQGLAEAAAAGKKLKENGYEFDIAFTSVLTRAIKTCNIVLEESDQLFVPQIKTWRLNERHYGQLQGLDKKQTAEQYGDEQVRIWRRSYDTLPPLLDKDDEFSAHKDRRYAHLPADVVPDGENLKVTLERVLPFWEDQIAPAILSGKRVLVAAHGNSLRALAKHIEGISDEDIMGLEIPTGQPLVYKLDDNLKVIEKFYL

SEQ ID NO: 156 - protein, 177 aa, Neisseria meningitidis
MGIYDFQMKDAEGNAVDLSGYRGKVLLIVNTATRCGLTPQYEALQKLYAQYTAEGLEILDFPCNQFREQAPESSGEIAQVCMMKFGTKFKIFDKIEVNGANTAPLYAYLKSVKPQDKGNHLFKDFVLKLAALGEKRDEGDIKWNFTKFLVNRDGEVVERFAPSVTPEEIEADIRALL

SEQ ID NO: 157 - protein, 201 aa, Neisseria meningitidis
LLFSSLLFSSLLFSSLLFSSAAQAASEDSSRSPYYVQADLAYAAERITHDYPKPTGTDKDKISTVSDYFRNIRAHSYHPRVSVGYDFGGWRIAADYASYRKWNNNKYSVNIKKGRETQDNREELKTENQENGSFHAASSLGLSAIYDFKLNDKFDKFKPYIGARVAYGHVKHQVHSVETKTTIVTSKPAATSPQGGPIIET

SEQ ID NO: 158 - protein, 368 aa, Neisseria meningitidis
MSLYPIYNFSAGPAVLPEAVLETARQEMLDYNGTGFPVMAMSHRSEMFLSILHHAEQDLRQLLKVPDNYKILFLQGGATTQFNMAAMNLAHGFRTADAVVTGNWSRIAYEQMSRLTDTEIRLAAHGGEQFDYLDLPPVETWDVAPDSAFVHFAVNETVNGLQYREVPCLSEGMPPLVCDMSSEILSREFDVADYGLIYAGAQKNIGPAGVTVVIVREDLLERCPNDIPDVFNYRSHINRDGMYNTPSTYAIYMSGLVFRWLQAQGGVKKIEAVNRLKAQTLYETIDGSDGFYINRIRPNARSKMNVVFQTGDEELDRRFVLEAELQGLCLLKGYKTVGGMRASIYNAMPLEGVRALADFMRDFQRRYG

SEQ ID NO: 159 - protein, 500 aa, Neisseria meningitidis
MSREMLQLAEALASEKNVDAEVVFQALEFALSTAAKKKADREHMDVRVQINRDTGEYQTFRRWLIVADEDYTYPDVEKTIEEIQEEIPGTTIQIGEYYEEQLPNEGFGRQAAQTAKQIILQRIRDAEREQNLNEFLAVKEDIVSGTVKRVERHGIIVEVVAGKLDALIPRDQMIPRENFRSGDRIRALFLRVEEIGNTGRKQVILSRTSGDFLVKLYANEVPEIADGMLEIRAVARDPGQRAKVAVKANDQRIDPQGTCIGVRGSRVNAVSNELSGERIDVVLWSPEPAQFVMSALSPAEVSRIVIDEDKHAVDVIVAEDQLALAIGRGGQNVRLASDLTGWQLNIMTSAEADERNAAEDAAIRRLFMDHLNVDEETADVLVQEGFATLEEVAYVPAAELLAIEGFDEEIVDMLRNRARDAILTMAIAAEEKLGEVSDDMRNLEGIDADMLRSLAEAGITTRDDLAELAVDELIEITGVNEETAKAVILTAREHWFTEDK

SEQ ID NO: 160 - protein, 303 aa, Neisseria meningitidis
MVHIMFNQAAQELTTIRDILRFAVSRFNEAGLFFGHGTDNAHDEAAYLILHTLNLPLDMLAPYLDAKLLEAEKEEVLAVIERRAVEHIPAAYLTHQAWQGEFDFYVDERVIIPRSFIYELLGDGLRPWIEYDELVHNALDLCTGSGCLAIQMAHHYPDAQIDAVDVSLDALEVAGINVEDYGLEERIRLIHTDLFEGLEGTYDLIVSNPPYVDAESVELLPEEYLHEPELALGSGADGLDATRQILLNAAKFLNPKGVLLVEIGHNRDVLEAAYPELPFTWLETSGGDGFVFLLTREQLLGEE

SEQ ID NO: 161 - protein, 431 aa, Neisseria meningitidis
MLDIQLLRSNTAAVAERLARRGYDFDTARFDTLEERRKSVQVKTEELQASRNSISKQIGALKGQGKHEEAQAAMNQVAQIKTDLEQAAADLDAVQKELDAWLLSIPNLPHESVPAGKDETENVEVRKVGTPREFDFEIKDHVDLGEPLGLDFEGGAKLSGARFTVMRGQIARLHRALAQFMLDTHTLQHGYTEHYTPYIVDDTTLQGTGQLPKFAEDLFHVTRGGDETKTTQYLIPTAEVTLTNTVADSIIPSEQLPLKLTAHSPCFRSEAGSYGKDTRGLIRQHQFDKVEMVQIVHPEKSYETLEEMVGHAENILKALELPYRVITLCTGDMGFGAAKTYDLEVWVPAQNTYREISSCSNCEDFQARRLKARFKDENGKNRLVHTLNGSGLAVGRTLVAVLENHQNADGSINIPAALQPYMGGVAKLEVK

SEQ ID NO: 162 - protein, 285 aa, Neisseria meningitidis
MARHVWQAGRFEIGLDKPKIMGIVNLTPDSFSDGGVYSQNAQTALAHAEQLLKEGADILDIGGESTRSGADYVSPEEEWARVEPVLAEVAGWGVPISLDTRRTVIMEKALALGGIDIINDVAALNDEGAVELLARQADTGICLMHMQGLPKTMQINPKYQDVVGEVARYLKARSAECIAAGIAPQRIILDPGFGSGFGKPLQHNIALMRHLPELMAETGFPLLIGVSRKSTIGELTGEANAAERVHGSVAAALASVARGAQIVRVHDVKATADALKVWEALGINL

SEQ ID NO: 163 - protein, 444 aa, Neisseria meningitidis
MTDLNTLFANLKQRNPNQEPFHQAVEEVFMSLDPFLAKNPKYTQQSLLERIVEPERVVMFRVTWQDDKGQVQVNRGYRVQMSSAIGPYKGGLRFHPTVDLGVLKFLAFEQVFKNALTTLPMGGGKGGSDFDPKGKSDAEVMRFCQAFMTELYRHIGADTDVPAGDIGVGGREIGYLFGQYKKIRNEFSSVLTGKGLEWGGSLIRPEATGYGCVYFAQAMLQTRNDSFEGKRVLISGSGNVAQYAAEKAIQLGAKVLTVSDSNGFVLFPDSGMTEAQLAALIELKEVRRERVATYAKEQGLQYFEKQKPWGVAAEIALPCATQNELDEEAAKTLLANGCYVVAEGANMPSTLGAVEQFIKAGILYAPGKASNAGGVATSGLEMSQNAIRLSWTREEVDQRLFGIMQSIHESCLKYGKVGDTVNYVNGANIAGFVKVADAMLAQGF

SEQ ID NO: 164 - protein, 412 aa, Neisseria meningitidis
MAFYAFKAMRAAALAAAVALVLSSCGKGGDAAQGGQPAGREAPAPVVGVVTVHPQTVALTVELPGRLESLRTADVRAQVGGIIQKRLFQEGSYVRAGQPLYQIDSSTYEAGLESARAQLATAQATLAKADADLARYKPLVAAEAVSRQEYDAAVTAKRSAEAGVKAAQAAIKSAGISLNRSRITAPISGFIGQSKVSEGTLLNAGDATVLATIRQTNPMYVNVTQSASEVMKLRRQIAEGKLLAADGVIAVGIKFDDGTVYPEKGRLLFADPAVNESTGQITLRAAVPNDQNILMPGLYVRVLMDQVAVDNAFVVPQQAVTRGAKDTVMIVNAQGGMEPREVTVAQQQGTNWIVTSGLKDGDKVVVEGISIAGITGAKKVTPKEWASSENQAAAPQSGVQTASEAKPASEAK

SEQ ID NO: 165 - protein, 190 aa, Neisseria meningitidis
MIMAKKISILVGSLRRASFARKVALNAAEMFPEGWQAEIVEIGHLPLYNFDYDDPAVEDVPLPESYTAFRETIKASDGILFVTSENNRTIPACLKNAVDIGSKPNADVAWKNKPAGIISHSVGKMGGYSSQKNLRLALSYFDMPVTGQPEVFLGNSPTLFDENGKLIDSARDFVQSYINQFVGLIERNAK

SEQ ID NO: 166 - protein, 199 aa, Neisseria meningitidis
MNNLIKINLLPYREEMNKRKQQQFKTLMYGAVLTGVAAVAATYLFIDNMINNQSERNTLLETSIAHLDTELSEIQKLKQEKDAFLIKKNKIEELQLKRLQAAKILDSLNEAVPGSTYLTSLDAVTADSYRLSGRTSSDNRVAAMMRAMPNTGIFKQPELLSIKKNNSHQEFTLQATLQPIVKAAESKENPASGNAQEAN

SEQ ID NO: 167 - protein, 215 aa, Neisseria meningitidis
MASKSSKTNLDLNNLHLLNLPARLFIALLAVAAVLGLGYAGLFKSQMESLEEYEAKETELKNTYKQKSIDAASLNNLRDELASIRSAFDIMLKQLPTDAEIPNLVQELHQAGSSNGLRLDSVMPQPPVDDGPIKRLPYSISITGNYEQISQFTRDVGSLSRIITLESLKIAQSPENGGNPDGKSSILNLSAIATTYQAKSVEELAAEAAQNAEQK

SEQ ID NO: 168 - protein, 181 aa, Neisseria meningitidis
MKHYALLISFLALSACSQGSEDLNEWMAQTRREAKAEIIPFQAPTLPVAPVYSPPQLTGPNAFDFRRMETDKKGENAPDTKRIKETLEKFSLENMRYVGILKSGQKVSGFIEAEGYVYTVGVGNYLGQNYGRIESITDDSIVLNELIEDSTGNWVSRKAELLLNSSDKNTEQAAAPAAEQN

SEQ ID NO: 169 - protein, 769 aa, Neisseria meningitidis
MNTKLTKIISGLFVATAAFQTASAGNITDIKVSSLPNKQKIVKVSFDKEIVNPTGFVTSSPARIALDFEQTGISMDQQVLEYADPLLSKISAAQNSSRARLVLNLNKPGQYNTEVRGNKVWIFINESDDTVSAPARPAVKAAPAAPAKQQAAAPSTKSAVSVSEPFTPAKQQAAAPFTESVVSVSAPFSPAKQQAAASAKQQAAAPAKQQAAAPAKQQAAAPAKQTNIDFRKDGKNAGIIELAALGFAGQPDISQQHDHIIVTLKNHTLPTTLQRSLDVADFKTPVQKVTLKRLNNDTQLIITTAGNWELVNKSAAPGYFTFQVLPKKQNLESGGVNNAPKTFTGRKISLDFQDVEIRTILQILAKESGMNIVASDSVNGKMTLSLKDVPWDQALDLVMQARNLDMRQQGNIVNIAPRDELLAKDKALLQAEKDIADLGALYSQNFQLKYKNVEEFRSILRLDNADTTGNRNTLISGRGSVLIDPATNTLIVTDTRSVIEKFRKLIDELDVPAQQVMIEARIVEAADGFSRDLGVKFGATGKKKLKNDTSAFGWGVNSGFGGDDKWGAETKINLPITAAANSISLVRAISSGALNLELSASESLSKTKTLANPRVLTQNRKEAKIESGYEIPFTVTSIANGGSSTNTELKKAVLGLTVTPNITPDGQIIMTVKINKDSPAQCASGNQTILCISTKNLNTQAMVENGGTLIVGGIYEEDNGNTLTKVPLLGDIPVIGNLFKTRGKKTDRRELLIFITPRIMGTAGNSLRY

SEQ ID NO: 170 - protein, 431 aa, Neisseria meningitidis
MSVIQDLQSRGLIAQTTDIEALDALLNEQKIALYCGFDPTADSLHIGHLLPVLALRRFQQAGHTPIALVGGATGMIGDPSFKAAERSLNSAETVAGWVESIRNQLTPFLSFEGGNAAIMANNADWFGSMNCLDFLRDIGKHFSVNAMLNKESVKQRIDRDGAGISFTEFAYSLLQGYDFAELNKRHGAVLEIGGSDQWGNITAGIDLTRRLHQKQVFGLTLPLVTKSDGTKFGKTEGGAVWLNAKKTSPYQFYQFWLKVADADVYKFLKYFTFLSIEEIDAIEAKDKASGSKPEAQRILAEEMTRLIHGEEALAAAQRISESLFAEDQSSLTESDFEQLALDGLPAFEVSDGINVVEALVKTGLASSNKEARGFVNSKAVLLNGKPAEANNPNHAAERPDDACLLNGEHKRFGKYTILRRGKRNHALLVWK

SEQ ID NO: 171 - protein, 363 aa, Neisseria meningitidis
MSLKCGIVGLPNVGKSTLFNALTQSGIEAANYPFCTIEPNVGIVEVPDPRMAELAKIVNPQKMQPAIVEFVDIAGLVAGASKGEGLGNQFLANIRETDAIVNVVRCFDDDNIVHVAGRVDPIADIETIGTELALADLASVEKAIVREEKRARSGDKDAQKLVDLCKKLLPHLDEGKPVRSFGLDAEERAMLKPLFLLTAKPAMYVGNVAEDGFENNPHLDRLKELAAKENAPVVAVCAAMESEIAELEDDEKAEFLAEMGLEEPGLNRLIRAGYDLLGLQTYFTAGVKEVRAWTIHKGDTAPQAAGVIHTDFERGFIRAQVISYDDFVSLGGEAKAKEAGKMRVEGKEYVVQDGDVMHFLFNV

SEQ ID NO: 172 - protein, 146 aa, Neisseria meningitidis
MPTQSKHASINIGLIQAREALMTQFRPILNQANITDQQWRIIRLLAENGTLDFQDLANQACILRPSLTGILTRLEKAGLVVRLKPSNDQRRVFLKLTAEGEKLYEEIGEEVDERYDAIEEVLGREKMLLLKDLLAELAKIEDALNS

SEQ ID NO: 173 - protein, 377 aa, Neisseria meningitidis
MSTPALLVLADGSVFHGTSIGYEGSTSGEVVFNTSMTGYQEILTDPSYCKQIVTLTYPHIGNTGTNAEDEESRSVYAAGLIIRDLPLLHSNFRASESLHDYLVRNKTVAIADIDTRRLTTLLREKGAQGGAILTGADATIEKAQELIAAFGSMVGKDLAKEVSCTETYEWTEGEWALGKGFVTPDEQPYHVVAYDFGVKTNILRMLASRGCRLTVVPAQTSAEDVLALNPDGVFLSNGPGDPEPCTYAIKAVQKLIESGKPIFGICLGHQLISLAIGAKTLKMRFSHHGANHPVQDLDSGKVVITSQNHGFAVDADTLPANARITHKSLFDNTLQGIELTDKPVFCFQGHPEASPGPQDVGYLFDKFIGNMKAAKRA

SEQ ID NO: 174 - protein, 213 aa, Neisseria meningitidis
MSIPINFNNLKYLLNDMRNKNRIIEAFPFNYNQRQYAVILTRYKPDEPRPDDYAQAKLEFFNLNSENSIFAYADFYEVHFKSATDFINFFKINVQAGAAKIREIFQSFSNLFADFIPTQTKKDLDIIYKKIVATRLEPNSPNTIYCYDVRRNGKDKAGKPNRRSVENSEKAKILRPELYEKFKADSNYSFFFSDNPSDEKTDAEIIREVTNRQ

SEQ ID NO: 175 - protein, 1071 aa, Neisseria meningitidis
MPKRTDLKSILIIGAGPIVIGQACEFDYSGAQACKALREEGYKVILVNSNPATIMTDPEMADVTYIEPIMWQTVEKIIAKERPDAILPTMGGQTALNCALDLARNGVLAKYNVELIGATEDAIDKAEDRGRFKEAMEKIGLSCPKSFVCHTMNEALAAQEQVGFPTLIRPSFTMGGSGGGIAYNKDEFLAICERGFDASPTHELLIEQSVLGWKEYEMEVVRDKNDNCIIICSIENFDPMGVHTGDSITVAPAQTLTDKEYQIMRNASLAVLREIGVDTGGSNVQFAVNPANGEMIVIEMNPRVSRSSALASKATGFPIAKVAAKLAVGFTLDELRNDITGGKTPASFEPSIDYVVTKIPRFAFEKFPAADDRLTTQMKSVGEVMAMGRTIQESFQKALRGLETGLCGFNPRSEDKAEIRRELANPGPERMLFVADAFRAGFTLEEIHEICAIDPWFLAQIEDLMKEEKAVSDGILSDLDFAALRRLKRKGFSDKRLAQLLNVSEKEVREHRYALKLHPVYKRVDTCAAEFATETAYLYSTYEEECESRPSDRKKVMILGGGPNRIGQGIEFDYCCVHAALALRESGFETIMVNCNPETVSTDFDTSDRLYFEPLTLEDVLEIVRTENPWGVIVHYGGQTPLKLANALVENGVNIIGTSADSIDAAEDRERFQKVLNDLGLRQPPNRIAHNEEEALVKAEEIGYPLVVRPSYVLGGRAMQVVHSAEELQKYMREAVQVSEDSPVLLDFFLNNAIEVDVDCVSDGKDVVIGGIMQHVEQAGIHSGDSGCSLPPYSLSEEIQDEIRRQTKAMAYALGVVGLMNVQFAVQDGVVFVLEVNPRASRTVPFVSKATGVPLAKVGARCMAGISLKEQGVEKEVVPDFYAVKEAVFPFIKFPGVDTILGPEMRSTGEVMGVGASFGEAYYKAQLGAGERLNPTGKIFLSVREEDKERVIKTAKNFQVLGYGICATRGTAQYLTEHGLIVQTINKVPEGRPHIGDALKNGEIALVVNTVSSDPQSVSDSHIIRQSALQQRVPQYTTTAGGEAMSEGAKSRDHLGVYSVQELHGRLKNRN

SEQ ID NO: 176 - protein, 346 aa, Neisseria meningitidis
MDISDFDFTLPEKLIAQHPPEVRGSSRLLVALPDMPLQDRVFGDLPDYVEAGDVLVFNNTKVMKARLFGQKDSGGRIEALIERVLDNHTALAHIRSSKSPKPGMGLVFEGGIRAVTVGREGELFCLRFEGGETVYELLEQNGHLPLPPYIERAADADDDSRYQTVYAKYQGAVAAPTAGLHFTEELLHRLKDKGAVTAEVTLHVGAGTFQPVRVDKIEEHKMHSEWFEVPSETAAAVEAAKARGNKVWAVGTTSMRALESAARATGRLKAGQGDTDIFITPGYRFNVVDRLVTNFHLPKSTLLMLVSAFSGMGHIRAAYRHAVEREYRFFSYGDAMVLGRNEGVVR

SEQ ID NO: 177 - protein, 453 aa, Neisseria meningitidis
MLKKVLIANRGEIALRVLRACREMGIATVAVHSEADKDSLHVKLADESVCIGPAASAQSYLNVPAIIAAAEVSCADAVHPGYGFLAENADFAEQVEQSGFTFIGPKPDTIRLMGDKVSAKHAMIAAGVPCVPGSDGALPDDGEEILKIADKVGYPVIIKASGGGGGRGMRVVEKKEDLLQSVEMTKAEAGAAFGNPMVYMERYLQRPRHVEIQVIADEHGNAIYLAERDCSLQRRHQKVIEEAPAPFITEKERAKIGNACADACKRIGYRGAGTFEFLYEDGEFFFIEMNTRVQVEHPVTELITGVDIVQEQLRIAAGLPLQYKQKDIQVEGHAFECRINAEDPYNFIPSPGLIESCHLPGGFGIRVDSHIYQGYRIPPYYDSLIGKICVHGKTREQAMAKMRVALAELAVTGIKTNTPLHRDLFADAGFQKGGVSIHYLEHWLEDRKAKQDK

SEQ ID NO: 178 - protein, 295 aa, Neisseria meningitidis
MPYQQITVNVNDAVAERLADALMEHGALSAAIEDAYAGTQNEQAIFGEPGMPAEQIWQQSKVIALFGEHDEAAAIIQTATQECGLKDLAYTGETIEDQDWVRLTQSQFDPIRISDRLWITPSWHEVPEGSAVNLRLDPGLAFGTGSHPTTRLCLKWLDTQLKNGESVLDYGCGSGILTIAALKLGAGFAVGVDIDEQAVRAGKDNAAQNNVDAQFFLPDGLPQGQFDVVVANILANPLRMLGEMLAARTKQGGRIVLSGLLDEQAEELGGIYSQWFDLDPAETEEGWARLSGVKR

SEQ ID NO: 179 - protein, 427 aa, Neisseria meningitidis
MNRNEILFDRAKAIIPGGVNSPVRAFGSVGGVPRFIKKAEGAYVWDENGTRYTDYVGSWGPAIVGHAHPEVVETVCEAALGGLSFGAPTEGEIVIAEEIAKIMPSVERLRLVSSGTEATMTAIRLARGFTGRDKIIKFEGCYHGHSDSLLVKAGSGLLTFGNPSSAGVPADFTKHTLVLEYNNIAQLEEAFAQSGNEIACVIVEPFVGNMNLVRPTEAFVKALRGLTEKYGAVLIYDEVMTGFRVALGGAQSLHGITPDLTTMGKVIGGGMPLAAFGGRKDIMECISPLGGVYQAGTLSGNPIAVAAGLKTLEIIQREGFYENLTARTEQLVQGFRTAADAAGIEFTADSVGGMFGLYFAAHAPRNYADMARSNIEGFKQFFHGMLDRNVAFGPSAYEAGFVSAAHTPELIDETVAVAVEVFKAMAE

SEQ ID NO: 180 - protein, 518 aa, Neisseria meningitidis
MTLAEFWPLCLRRLHDMLPQGQFAQWIAPLTVGEEGGVWVVYGKNQFACNMLKSQFAGKIEAVREELAAGRSAFVFKPGEGVRYEMAAVEGAVEPAEPSLHAVSEGMPVQEVLLDELPSEEPVKPAASKTAADILAERMKNLPHEPRQAAGSASRPESVAVAKARTDVQRDAEEARYEQTNLSPDYTFDTLVEGKGNRLAAAAAQAIAESPGQSYNPFFLYGSTGLGKTHLVQAVGNELLKNRPDAKVRYMHSDDYIRSFMKAVRNNTYDVFKQQYKQYDLLIIDDIQFIKGKDRTMEEFFYLYNHFHNEKKQLILTCDVLPAKIEGMDDRLKSRFSWGLTLELEPPELEMRIAILQKKAEAAGISIEDEAALFIANLIRSNVRELEGAFNRVGASSRFMNRPVIDIDLARTALQDIIAEKHKVITADIIIDAVAKYYRIKISDVLGKKRTRNIARPRQVAMSLTKELTTLSLPSIGDSFGGRDHTTVMHGIRAVAKLREEDPELAQDYEKLLILIQN

SEQ ID NO: 181 - protein, 521 aa, Neisseria meningitidis
MTQDKILILDFGSQVTQLIARRVREAHVYCELHSFDMPLDEIKAFNPKGIILSGGPNSVYESDYQADTGIFDLGIPVLGICYGMQFMAHHLGGEVQPGNQREFGYAQVKTIDSELTRGIQDGEPNTLDVWMSHGDKVSKLPDGFAVIGNTPSCPIAMMENAEKQFYGIQFHPEVTHTKQGRALLNRFVLDICGAQPGWTMPNYIEEAVAKIREQVGSDEVILGLSGGVDSSVAAALIHRAIGDQLTCVFVDHGLLRLNESKMVMDMFARNLGVKVIHVDAEGQFMAKLAGVTDPEKKRKIIGAEFIEVFDAEEKKLTNAKWLAQGTIYPDVIESAGAKTKKAHAIKSHHNVGGLPENMKLKLLEPLRDLFKDEVRELGVALGLPREMVYRHPFPGPGLGVRILGEVKKEYADLLRQADDIFIQELRNTTDENGTSWYDLTSQAFAVFLPVKSVGVMGDGRTYDYVIALRAVITSDFMTAHWAELPYSLLGKVSNRIINEVKGINRVVYDVSGKPPATIEWE

SEQ ID NO: 182 - protein, 248 aa, Neisseria meningitidis
MSTQDLNGKIALVTGASRGIGAAIADTLAAAGAKVIGTATSESGAAAISERLAQWGGEGRVLNSAEPETIESLIADIEKAFGKLDILVNNAGITRDNLLMRMKEEEWDDIMQVNLKSVFRASKAVLRGMMKQRSGRIINITSVVGVMGNAGQTNYAAAKAGLIGFSKSMAREVGSRGITVNCVAPGFIDTDMTRALPEETRQTFTAQTALGRFGDAQDIADAVLFLASDQAKYITGQTLHVNGGMLMP

SEQ ID NO: 183 - protein, 687 aa, Neisseria meningitidis
MMTQTLLIELLTEELPPKALNNLGNHFAASVAEGLEKAQLVDGAAEFTAYASPRRLAVQVKNVKAVQADQKIVKKGPAVANAMKDGAPTKALEGFARGAGAKIEDLTIVHDGKQDVYAYEYVQIGKPLGGLLEDIINQAVKKLPIPKVMRWGSSTFTFVRPVHGLVVLHGGDIVNVSVLGLQSGNKTLGHRFLSDGEITIENADSYAAQMREQGKVVASFAERKAAIQTVLEGQARRLNATAAADEALLDEVTALVEWPVVLEAGFEEHFLAVPQECLILTMQQNQKYFPLLDQNGKLMNRFLLVSNLQTEDPSHIIQGNERVLRARLSDAEFFYKQDQKATLESRLPKLTNVVYHNKIGSQAERIERLQSIAAHIAKALGADAAAAERAARLAKADLVTEMVGEFPELQGTMGKYYARLDGETEEITEAVEQHYQPRFAGDNLPEGKIAAAVALADKLETLVGIWGIGLIPTGDKDPYALRRAALGILRMLMQYGLDVNELIQTAFNSFPQGLLNEKTPSETADFMQARLAVLLQNDYPQDIVAAVLAKQPRRLDDLTAKLQAVAAFKQLPEAAALAAANKRVQNLLKKADAELGAVNESLLQQDEEKALFAAAQGLQPKIAAAVAEGNFQTALSELASVKPQVDAFFDGVMVMAEDAAVKQNRLNLLNRLAEQMNAVADIALLGE

SEQ ID NO: 184 - protein, 465 aa, Neisseria meningitidis
MSQGKIVQIIGAVVDVEFPRDMIPRVYDALKLDENGLTLEVQQLLGDGVVRAIAMGSSDGLKRGMTVSNTGAPITVPVGKGTLGRIVDVLGTPVDEAGPIDTDKSRAIHQAAPKFDELSSTTELLETGIKVIDLLCPFAKGGKVGLFGGAGVGKTVNMMELINNIAKAHSGLSVFAGVGERTREGNDFYHEMKDSNVLDKVAMVYGQMNEPPGNRLRVALTGLTMAEYFRDEKDENGKGRDVLFFVDNIYRYTLAGTEVSALLGRMPSAVGYQPTLAEEMGRLQERITSTQTGSITSIQAVYVPADDLTDPSPATTFAHLDATVVLSRDIASLGIYPAVDPLDSTSRQLDPMVLGQEHYDVARGVQSTLQKYKELRDIIAILGMDELSDEDKLTVMRARKIQRFLSQPFHVAEVFTGSPGKYVALRDTIAGFKAILNGEYDHLPEQAFYMVGSIEEAVEKAKTLN

SEQ ID NO: 185 - protein, 515 aa, Neisseria meningitidis
MQLNPAEISDLIKAKIENLSVNAEVRTCGTVISVTDGIVRIHGLSDAMQGEMLEFPGNTFGLAMNLERDSVGAVVLGEYEHIKEGDTVTCTGRILEVPVGRELVGRVVDALGRPIDGKGPINTTLTAPIEKIAPGVIARKSVDQPMQTGLKAIDSMVPVGRGQRELIIGDRQTGKTAVALDAIVNQKGTGVICIYVAIGQKASSIANVVRKLEEHGAMEHTIVVAATASEAAALQYIAPYSGCTMGEFFRDRGEDALIVYDDLSKQAVAYRQISLLLRRPPGREAYPGDVFYLHSRLLERAARVNEHEVEKLTNGEVKGKTGSLTALPIIETQAGDVSAFVPTNVISITDGQIFLETDLFNAGIRPAINAGISVSRVGGAAQTKVIKKLGGGIRLALAQYRELAAFSQFASDLDEATRKQLEHGEVVTELMKQKQFSTLNTAEMALTLWAINNGSYSDVPVAKALAFESEFLSFVRTQHPEVLEAVNASGAMSDESEKTLEAAMKSFKSSYAYQA

SEQ ID NO: 186 - protein, 177 aa, Neisseria meningitidis
MAEFATIARPYAKALFGLAQEKNQIESWLGGLEKLAAVVQEGKVASLIDRPETNASEKADILIDLVGLKDKELKNFVIVLAGQKRLSILPEVYAQYQDLTLSFNHIKSAVIYSAYPLTDKQVGELVQMLNKRFDSELKISVEIEPELIGGIKVEVGDQVLDLSVQGKLSALYTTMTN

SEQ ID NO: 187 - protein, 156 aa, Neisseria meningitidis
MNINATLFAQIIVFFGLVWFTMKFVWPPIAKALDERAAKVAEGLAAAERGKSDFEQAEKKVAELLAEGRNQVSEMVANAEKRAAKIVEEAKEQASSEAARIAAQAKADVEQELFRARESLREQVAVLAVKGAESILRSEVDASKHAKLLDTLKQEL

SEQ ID NO: 188 - protein, 201 aa, Neisseria meningitidis
MMTLYSGITCPFSHRCRFVLYEKGMDFEIKDVDIYNKPEDLAVMNPYNQVPVLVERDLVLHESNIINEYIDERFPHPQLMPGDPVMRGRGRLVLYRMEKELFNHVQVLENPAATNKEQAKAREAIGNGLTMLAPSFSKSKYILGEDFSMIDVALAPLLWRLDHYDVKLGKSAAPLLKYAERIFQREAFIEALTPAEKAMRK

SEQ ID NO: 189 - protein, 266 aa, Neisseria meningitidis
MSPSPFIEMKDVAFAYGDRPILKNINFSIPQGNFAAVMGGSGSGKTTLMRLITGQIRPQSGQVLIEGRDLAGFSADELYEHRRRMGVLFQHGALFTDLSVFDNIAFPMRELTRLPEAVIRDLVLLKLNAVGLRGVENLMPSELSGGMSRRVALARTIALDPEIMLYDEPFTGLDPISLGVIAHLISRVNKALRSTSIMVTHDIEKSLEIVDQVIFLAHGEIMFSGSPQEMRELDSPWVRQFVGGLADGPVAYRYPAQTSLQQDLLG

SEQ ID NO: 190 - protein, 480 aa, Neisseria meningitidis
MKQLAMYINGRFENDFNGEWRDVLNPSTEEAIAREPKGGKADVDRAVAAARAAQPAWERLPAVERGAYLRKIAQGIRERADELTDTIVAEGGKTKDLARVEVMFTADYLDYQAEWARRYEGEIIQSDRPRENILLFKRPLGVIAGILPWNFPFFLIARKMGPALVTGNTIVVKPSSVTPINCHIFAEIVDAVGLPAGVFNVVNGPGAEIGNALSAHPQVDMVSLTGSVEAGRQVMEAASANITKVSLELGGKAPAIVLKDADLDLAVKSILASRVGNTGQICNCAERVYVHSSLKDAFIEKMTAAMKGVRYGNPAEAEAGALEMGPLIEERAVKAVAEKVERAVKQGAKLVCGGKRAEGRGYFFEPTLLTDTDNSMDIMKEETFGPVLPVSAFDTLDQVIALANDCEFGLTSSVYTTNLNEAFYVTRRLQFGETYINRENFEAMQGFHAGWKKSGIGGADGKHGLEEYLQTQVVYLETDI

SEQ ID NO: 191 - protein, 938 aa, Neisseria meningitidis
MSNRPTLLLVDGSSYLYRAYHAMGQNLTAPDGAPTGALYGVLNMLRRLRSEYPHDYCAVVFDAKGKNFRHQMFEEYKATRPPMPDDLRPQAEALPDLVRLTGWPVLVIGQVEADDVIGTLAKQGAEHGLRVIVSTGDKDMAQLVDERVTLVNTMSSETLDIEGVKAKFGVRPDQIRDYLALMGDKVDNVPGVEKCGPKTAVKWLEAYGSLAGVMEHASEIKGKVGENLQAALPQLPLSYDLVTIKTDVDLHAELSDGIESLRRTTPKWAQLVVDFKRWGFRTWLKEAESNMNTGSTDDLFGSDSIGEQAALNAEMPFEKQAEKATAPEKLDYQAVTTEAQFAALLDKLSRADTIGIDTETTSLDAMNASLVGISIAFQAGEAVYIPVGHSLTAAPEQLDLQDVLGRLKPHLGNPALKKIGQNLKYDQHVFANYGIALNGIAGDAMLASYIIESHLGHGLDELSERWLGLETITYESLCGKGAKQIGFADVAIGQATEYAAQDADFALRLEAHLRAQMDEKQLEMYEKMELPVAQVLFEMERNGVQIDRAELARQSAELGAELMKLEQEAYAAAGQPFNLNSPKQLQEILFDKMGIPTKGLKKTAKGGISTNEAVLEQLAPDYPLPKIILQNRSLAKLKSTYTDKLPEMISPKDGRVHTTYAQAVAITGRLASNNPNLQNIPIRTEEGRKVRRAFTAPQGSVIVSADYSQIELRIMAHLSGDKTLIAAFQNGEDVHRRTAAEVFGTAPENVSSEQRRYAKSINFGLIYGMGQYGLAKSLGIDNLSAKNFIDRYFARYPGVAEYMQRTKEQAAAQGYVETLFGRRLYLPDIRNKNANARAGAERAAINAPMQGTASDLIKRAMIDVSRWLSECEASPWDELLQSKLIMQVHDELVLEVVETELDFVKEKLPQIMAKVDGGLLDVPLVAEVGVGENWEEAH

SEQ ID NO: 192 - protein, 1320 aa, Neisseria meningitidis
MSVVLPLRGVTALSDFRVEKLLQKAAALGLPEVKLSSEFWYFVGSEKALDAATVEKLQALLAAQSVEQTPKAREGLHLFLVTPRLGTISPWASKATNIAENCGLAGIERIERGMAVWLEGRLNDEQKQQWAALLHDRMTESVLPDFQTASKLFHHLESETFSGVDVLGGGKEALVKANTEMGLALSADEIDYLVENYQALQRNPSDVELMMFAQANSEHCRHKIFNADFILNGEKQPKSLFGMIRDTHNAHPEGTVVAYKDNSSVIEGAKIERFYPNAAENQGYRFHEEDTHIIMKVETHNHPTAIAPFAGAATGAGGEIRDEGATGKGSRPKAGLTGFTVSNLNIPDLKQPWEQDYGKPEHISSPLDIMIEGPIGGAAFNNEFGRPNLLGYFRTFEEKFDGQVRGYHKPIMIAGGLGSIQAQQTHKDEIPEGALLIQLGGPGMLIGLGGGAASSMDTGTNDASLDFNSVQRGNPEIERRAQEVIDRCWQLGGKNPIISIHDVGAGGLSNAFPELVNDARRGAVFKLREVPLEEHGLNPLQIWCNESQERYVLSILEKDLDAFRAICERERCPFAVVGTATDDGHLKVRDDLFANNPVDLPLNVLLGKLPKTTRTDKTVAPSKKPFHAGDIDITEAAYRVLRLPAVAAKNFLITIGDRSVGGLTHRDQMVGKYQTPVADCAVTMMGFNTYRGEAMSMGEKPTVALFDAPASGRMCVGEAITNIAAVNIGDIGNIKLSANWMAACGNEGEDEKLYRTVEAVSKACQALDLSIPVGKDSLSMKTVWQDGEEKKSVVSPLSLIISAFAPVKDVRKTVTPELKNVEDSVLLFVDLGFGKARMGGSAFGQVYNNMSGDAPDLDDTGRLKAFYSVIQQLVAENKLLAYHDRSDGGLFAVLVEMAFAGRCGLDIDLNLLLAQTFITNHTALSQSLRTEEVKALAEWQETIARTLFNEELGAVIQVRKQDVADIINLFYQQQLHHNVFEIGTLTDENTLIIRDGQTHLISDNLIKLQQTWQETSHQIQRLRDNPACADSEFALIGDNERSALFADVKFDVNEDIAAPFINSGAKPKIAILREQGVNGQIEMAAAFTRAGFDAYDVHMSDLMAGRIHLADFKMLAACGGFSYGDVLGAGEGWAKSILFHPALRDQFAAFFADPDTLTLGVCNGCQMVSNLAEIIPGTAGWPKFKRNLSEQFEARLSMVHVPKSASLILNEMQGSSLPVVVSHGEGRADFALHGGNISADLGIALQYIDGQNQVTQTYPLNPNGSPQGIAGVTNADGRITIMMPHPERVYRAAQMSWKPEGWTELSGWYRLFAGARKALG

SEQ ID NO: 193 - protein, 302 aa, Neisseria meningitidis
MNQTAINRADVRTRFIFDDMPVRGLHVRLENVWQHIVKQKNYPAAIRRALGELLAAGVLLSGNLKNEGTLIVQVQGRGRLKMLVAEAASDRTVRATARWDETAEIADDESLGDLLGEGGVFVLTLQPKDGEPWQGVVPLEGGGIAQMLVNYMKRSEQLDTHIVLSASDEAAGGLLVQRLPEEVLDEEAWEHVSTLARTLTAEELAGLDAQHVLYRLFHETPPRVFEPETFEFSCTCSRGKVSDMLLMLGGEEVGGVVVEQGSIEVDCDFCHSKYVFDETDVNALFGEDVVGVAKGLPRHTVQ

SEQ ID NO: 194 - protein, 331 aa, Neisseria meningitidis
MKKSLIALTLAALPVAAMADVTLYGTIKAGVETSRSVFHQNGQVTEVTTATGIVDLGSKIGFKGQEDLGNGLKAIWQVEQKASIAGTDSGWGNRQSFIGLKGGFGKLRVGRLNSVLKDTGDINPWDSKSDYLGVNKIAEPEARLISVRYDSPEFAGLSGSVQYALNDNAGRHNSESYHAGFNYKNGGFFVQYGGAYKRHHQVQEGLNIEKYQIHRLVSGYDNDALYASVAVQQQDAKLTDASNSHNSQTEVAATLAYRFGNVTPRVSYAHGFKGLVDDADIGNEYDQVVVGAEYDFSKRTSALVSAGWLQEGKGENKFVATAGGVGLRHKF

SEQ ID NO: 195 - protein, 143 aa, Neisseria meningitidis
MKTFSAKPHEVKREWFVIDAQDKVLGRVAAEVASRLRGKHKPEYTPHVDTGDYIIVINADKLRVTGAKFEDKKYFRHSGFPGGIYERTFREMQEQFPGRALEQAVKGMLPKGPLGYAMIKKLKVYAGAEHAHAAQQPKVLELK

SEQ ID NO: 196 - protein, 371 aa, Neisseria meningitidis
MKVGFVGWRGMVGSVLMQRMKEENDFAHIPEAFFFTTSNVGGAAPDFGQAAKTLLDANNVAELAKMDIIVTCQGGDYTKSVFQALRDSGWNGYWIDAASSLRMKDDAIIVLDPVNRDVLDNGLKNGVKNYIGGNCTVSLMLMALGGLFQNDLVEWATSMTYQAASGAGAKNMRELISGMGAVHAQVADALADPAGSILDIDRKVSDFLRSEDYPKANFGVPLAGSLIPWIDVDLGNGQSKEEWKGGVETNKILGRSDNPTVIDGLCVRVGAMRCHSQAITLKLKKDLPVSEIETILAGANDWVKVIPNEKEASIHELTPAKVTGTLSVPVGRIRKLGMGGEYISAFTVGDQLLWGAAEPLRRVLRIVLGSL

SEQ ID NO: 197 - protein, 384 aa, Neisseria meningitidis
MKFIDEAKIEVAAGKGGNGATSFRREKFVPRGGPDGGDGGKGGSVWAEADENTNTLVEYRFVKRYQAKNGEKGHGSDRYGAGADDIVLKMPVGTLIRDLDTGETVADLTYHGQRVCLAKGGKGGLGNIHFKSSVNRAPKQSTPGEEGEARSLQLELKVLADVGLLGMPNAGKSTLITAVSAARPKIANYPFTTLHPNLGVVRIDENHSFVMADIPGLIEGAAEGAGLGHRFLKHLSRTGLLLHVVDLAPFDETVNPAEEALAIINELRKYDEELYGKPRWLVLNKLDMLDEEEAQTRTAAFLEAVGWDYPKPDDRFQFDMETPRLFQISALTHQGTQELVHQINQYLTEKKRIEAEKAEAEKAAANVEIIEQQPKTDTGVFKPE

SEQ ID NO: 198 - protein, 242 aa, Neisseria meningitidis
MSQITMRQMIEAGVHFGHQTRFWNPKMAQYIFGARNKIHIVNLEKTLPMFQDAQEAVRRLVANKGTVLFVGTKRQARDIIREEATRAGMPFVDYRWLGGMLTNYKTVKQSIKRLEEKTAALENAAESGFSKKEILEMQRDVEKLERSLGGIKNMKGLPDAIFVIDTGYQKGTLVEAEKLGIPVIAVVDTNNSPDGVKYVIPGNDDSAKAIRLYCRGIADAVLEGKNQALQETVAAAQEAAAE

SEQ ID NO: 199 - protein, 284 aa, Neisseria meningitidis
MAEITAKMVADLRAATGLGMMECKKALVEAEGNFDKAEEILRIKSGAKAGKLAGRTAAEGVLAYAINGNVGALVEVNCETDFVAKDAGFVEFANFVAKTAAEKKPASVEELSELVEAERKAIIAKLGENMSVRRFQVIDTANQLVAYIHGALATEGVLVEYKGSEDVARKIGMHIVAAKPQCVSEAEVDAETVEKERHIYTEQAIASGKPADIAAKMVEGRIRKFLAEITLNGQAFVMNPDQTVAQFSKENGTEVISFVRYKVGDGIEKKAVDYAAEVAAAAKV

SEQ ID NO: 200 - protein, 239 aa, Neisseria meningitidis
MTQQIKYKRVLLKLSGESLMGSDPFGINHDTIVQTVGEIAEVVKMGVQVGIVVGGGNIFRGVSAQAGSMDRATADYMGMMATVMNALALKDAFETLGIKARVQSALSMQQIAETYARPKAIQYLEEGKVVIFAAGTGNPFFTTDTAAALRGAEMNCDVMLKATNVDGVYTADPKKDPSATRYETITFDEALLKNLKVMDATAFALCRERKLNIVVFGIAKEGSLKRVITGEDEGTLVHC

SEQ ID NO: 201 - protein, 447 aa, Neisseria meningitidis
MSQNHTILQSLPVGQKVGIAFSGGLDTSAALLWMKLKGALPYAYTANLGQPDEDDYNAIPKKAMEYGAENARLIDCRAQLAHEGIAAIQCGAFHVSTGGIAYFNTTPLGRAVTGTMLVSAMKEDDVNIWGDGSTYKGNDIERFYRYGLLTNPALKIYKPWLDQQFIDELGGRHEMSEFLIANGFNYKMSVEKAYSTDSNMLGATHEAKDLEFLNSGIKIVKPIMGVAFWDENVEVSPEEVSVRFEEGVPVALNGKEYADPVELFLEANRIGGRHGLGMSDQIENRIIEAKSRGIYEAPGMALFHIAYERLVTGIHNEDTIEQYRINGLRLGRLLYQGRWFDSQALMLRETAQRWVAKAVTGEVTLELRRGNDYSILNTESPNLTYQPERLSMEKVEDAAFTPLDRIGQLTMRNLDITDTRVKLGIYSQSGLLSLGEGSVLPQLGNKQ

SEQ ID NO: 202 - protein, 367 aa, Neisseria meningitidis
MEAEVINQLNNTLNDLEKRSEDIRVYMDYQGKKDRLEEVIGLSEDPELWNDPKRAQEIGKERKILEGIVLTLDNIASGIEDNRMLIEMTVEENDEEGFAAVQEDVAGLEKQMADLEFKRMFNQPADPNNCFIDITAGAGGTEAEDWAGMLFRMYSRYAERKGFRIEILEEDDGEIAGINRATIRVEGEYAYGLLRTETGVHRLVRYSPFDSNNKRHTSFASVFVYPEIDDSIEIEINPADLRIDTYRASGAGGQHINKTDSAVRITHEPTGIVVQCQNDRSQHANKAAAMEMLKSKLYELEMRKRNEEKQALEEGKSDVGWGSQIRSYVLDSSRIKDLRTGYEVGNTKAVLDGDLDGFIEASLKQGV

SEQ ID NO: 203 - protein, 311 aa, Neisseria meningitidis
MSVLIIVEHDNKQLNPTTLHAVTAAAKLGKVDLLVAGNGASAVVEFAKQVAGVKKVLVADAAHYAEGLAEELAPLVVKLAADYRYVAATATTFGKNLLPRVAALLDVPQISDLTEIVDNTTFVRPIYAGNAFETVQADSEKLVLTFRATVFDAVAAQGGNAEVINVEATPAQNLSRFVNRQLSHSDRPELTQAKVIVSGGRALGSAEKFNEVLTPLADVLGAAIGASRAAVDAEYAPNDAQVGQTGKVVAPQLYFAIGISGAIQHVAGMQDSKVIVAINKDADAPIFNVADYGLVGDLFEIVPQLTEVLKN

SEQ ID NO: 204 - protein, 249 aa, Neisseria meningitidis
MKALVAVKRVVDYNVKVRVKADGSDVDIGNVKMSMNPFDEIAVEEAVRLKEAGKVSEIVAVSLGEKKCEETLRTALAMGADRAIHVETDTKLESLAVAKLLKAVADKENPQIFFLGKQAIDDDANQVAQMLAALLNAAQGTFASKVQIEGDEVQIVREIDGGEETIALKLPAVISADLRLNEPRFVKLPNIMAAKKKPLEKLTPDDLVADISPRLKTVKFAEPKARQAGVKVASVAELVEKLKNEAKVI

SEQ ID NO: 205 - protein, 334 aa, Neisseria meningitidis
MSIKVAINGFGRIGRLALRQIEKAHDIEVVAVNDLTPAEMLLHLFKYDSTQGRFQGTAELKDDAIVVNGKEIKVFANPNPEELPWGELGVDVILECTGFFTNKTKAEAHIRAGARKVVISAPGGNDVKTVVYGVNQDILDGSETVISAASCTTNCLAPMAAVLQKEFGVVEGLMTTIHAYTGDQNTLDAPHRKGDLRRARAAALNIVPNSTGAAKAIGLVIPELNGKLDGSAQRVPVASGSLTELVSILERPVTKEEINAAMKAAASESYGYNEDQIVSSDVVGIEYGSLFDATQTRVMTVGGKQLVKTVAWYDNEMSYTCQLVRTLEYFAGKI

SEQ ID NO: 206 - protein, 223 aa, Neisseria meningitidis
MKTVSTAVVLAAAAVSLTGCATESSRSLEVEKVASYNTQYHGVRTPISVGTFDNRSSFQKGIFSDGEDRLGSQAKTILVTHLQQTNRFNVLNRTNLNALKQESGISGKAHNLKGADYVVTGDVTEFGRRDVGDHQLFGILGRGKSQIAYAKVALNIVNVNTSEIVYSAQGAGEYALSNREIIGFGGTSGYDATLNGKVLDLAIREAVNSLVQAVDNGAWQPNR

SEQ ID NO: 207 - protein, 389 aa, Neisseria meningitidis
MSEYLFTSESVSEGHPDKVADQVSDAILDAILAQDPKARVAAETLVNTGLCVLAGEITTTAQVDYIKVARETIKRIGYNSSELGFDANGCAVGVYYDQQSPDIAQGVNEGEGIDLNQGAGDQGLMFGYACDETPTLMPFAIYYSHRLMQRQSELRKDGRLPWLRPDAKAQLTVVYDSETGKVKRIDTVVLSTQHDPSIAYEELKNAVIEHIIKPVLPSELLTDETKYLINPTGRFVIGGPQGDCGLTGRKIIVDTYGGAAPHGGGAFSGKDPSKVDRSAAYACRYVAKNIVAAGLATQCQIQVSYAIGVAEPTSISIDTFGTGKISEEKLIALVREHFDLRPKGIVQMLDLLRPIYSKSAAYGHFGREEPEFTWERTDKAAALRAAAGL

SEQ ID NO: 208 - protein, 167 aa, Neisseria meningitidis
MALLNILQYPDERLHTVAKPVEQVDERIRKLIADMFETMYESRGIGLAATQVDVHERVVVMDLTEDRSEPRVFINPVIVEKDGETTYEEGCLSVPGIYDTVTRAERVKVEALNEKGEKFTLEADGLLAICVQHELDHLMGIVFVERLSQLKQGRIKTKLKKRQKHTI

SEQ ID NO: 209 - protein, 477 aa, Neisseria meningitidis
MSQYDVVVIGAGPGGYVAAIRAAQLGFKTACVDAGVNKAGNAPALGGTCLNVGCIPSKALLQSSEHFHAAQHEFAEHGITVGDVKFDAAKMIERKDAIVTKLTGGVKFLFQKNKVTSLFGTASFAGKNGDAYQIEVDNKGEKTVIEAKHVIVATGSVPRPLPQVAIDNVNVLDNEGALNLTEVPAKLGVIGSGVIGLEMGSVWNRVGAEVTILEAAPTFLAAADQQIAKEAFKYFTKEQGLSIELGVKIGDIKSEGKGVSVAYETAAGEAKTEVFDKLIVAIGRIPNTKGLNAEAVGLEKDERGFIKVDGECRTNLPNVWAIGDVVRGPMLAHKASDEGVAVAERIAGQKPHIDFNNVPFVIYTDPEIAWVGKTEEQLKAEGVEYKKGTSGFGANGRALAMGKAKGTVKVLADAKTDRILGVHMIGPVVSELVTEGVTALEFFASSEDIARIIHAHPTLSEVVHEAALAADKRALHG

SEQ ID NO: 210 - protein, 315 aa, Neisseria meningitidis
MMIEKSISIVDGKEYSVFAVSHEFRYTFDEPILVADLISSLKAYETLTSSYLPAILNQLFDVKIQKIKVAVSEIERGSFLEKLIFNLFFKDEDAYNEFCLKIRKFLGTENQDGSINMSKIIMFAMTTLLGVGAGYLLFKNPPQEKQAITNNIVTVINADSSVALDGEHLVSVVKEVTGSSKQKTAENVAKVYAPASKNNGSITLGTDDVRIEPVAQQTVATLPKDVDLRDTPLTEDYTDIDVQIRATDRDKNSGWYAVIDQIVPSRVRLELPEDIDLNRLANNATIRANVTVEFDLKQNGSRKPKKIILTSLSTD

SEQ ID NO: 211 - protein, 416 aa, Neisseria meningitidis
MFSKSVTLAQYDPDLAAAIAQEDQRQQDHVELIASENYVSCAVMDAQGSQLTNKYAEGYPGKRYYGGCEYVDIVEQLAIDRVKELFGAAYANVQPHSGSQANQAVYASVLKPGDTILGMSLAHGGHLTHGASVNISGKLYNAVTYGLDENEVLDYAEVERLALEHKPKMIVAGASAYALQIDWAKFREIADKVGAYLFVDMAHYAGLVAGGEYPNPVPFCDFVTTTTHKTLRGPRGGVILCRDNTHEKALNSSIFPSLQGGPLMHVIAAKAVAFKEALQPEFKQYAKQVKINAAAMAEELVKRGLRIVSGRTESHVFLVDLQPMKITGKAAEAALGKAHITVNKNAIPNDPEKPFVTSGIRIGSAAMTTRGFNEADARVLANLVADVLSNPEDEANLAKVRKQVTALCNKYPVYGA

SEQ ID NO: 212 - protein, 233 aa, Neisseria meningitidis
MSARENILAKLKKADALPMEEPAVFDYYREMGVSWGSEVERLKHWAAAMRAVKTEIYWVTKSNWMQVFREAAEGKGLKNILLPLATEHGQIARAALADSNIEPIAFEREIDTWKTEFFTNIDAGFSGAQCGIARTGTLMLFSSPEEPRTLSLVPPVHFCLFDTSKMYNEFHNAVEGEKLVENGMPTNVFLISGPSKTADIQLTLAYGAHGPRDLVILAILPDHISPADLEENA

SEQ ID NO: 213 - protein, 174 aa, Neisseria meningitidis
MSLNKVILIGRLGRDPEVRYMPNGEAVCNFSVATSETWNDRNGQRVERTEWHNITMYRKLAEIAGQYLKKGGLVYLEGRIQSRKYQGKDGIERTAYDIVANEMKMLGGRNENSGGAPYEEGYGQSQEAYQRPAQQSRQPASDAPSHPQEAPAAPRRQPVPAAAPVEDIDDDIPF

SEQ ID NO: 214 - protein, 943 aa, Neisseria meningitidis
MNKKHGFPLTLTALAIATAFPAYAAQAGGATPDAAQTQSLKEITVRAAKVGRRSKEATGLGKIVKTSETLNKEQVLGIRDLTRYDPGVAVVEQGNGASGGYSIRGVDKNRVAVSVDGVAQIQAFTVQGSLSGYGGRGGSGAINEIEYENISTVEIDKGAGSSDHGSGALGGAVAFRTKEAADLISDGKSWGIQAKTAYGSKNRQFMKSLGAGFSKDGWEGLLIRTERQGRETRPHGDIADGVEYGIDRLDAFRQTYDIKRKTREPFFSVEGERESKPVAKLAGYGKYLNNQLNRWVKERIEQNQPLSAEEEAQVREAQARHENLSAQAYTGGGRILPDPMDYRSGSWLAKLGYRFGGRHYVGGVFEDTKQRYDIRDMTEKQYYGTDEAEKFRDKSGVYDGDDFRDGLYFVPNIEEWKGDKNLVRGIGLKYSRTKFIDEHHRRRRMGLLYRYENEAYSDNWADKAVLSFDKQGVATDNNTLKLNCAVYPAVDKSCRASADKPYSYDSSDRFHYREQHNVLNASFEKSLKNKWTKHHLTLGFGYDASKAISRPEQLSHNAARISESTGFDENNQDKYLLGKPEVVEGSVCGYIETLRSRKCVPRKINGSNIHISLNDRFSIGKYFDFSLGGRYDRKNFTTSEELVRSGRYVDRSWNSGILFKPNRHFSVSYRASSGFRTPSFQELFGIDIYHDYPKGWQRPALKSEKAANREIGLQWKGDFGFLEISSFRNRYTDMIAVADHKTKLPNQAGQLTEIDIRDYYNAQNMSLQGVNILGKIDWNGVYGKLPEGLYTTLAYNRIKPKSVSNRPGLSLRSYALDAVQPSRYVLGFGYDQPEGKWGANIMLTYSKGKNPDELAYLAGDQKRYSTKRASSSWSTADVSAYLNLKKRLTLRAAIYNIGNYRYVTWESLRQTAESTANRHGGDSNYGRYAAPGRNFSLALEMKF

SEQ ID NO: 215 - protein, 544 aa, Neisseria meningitidis
MTKFIFVTGGVVSSLGKGIAAASIAAILESRGLNVTMLKLDPYINVDPGTMSPFQHGEVFVTDDGAETDLDLGHYERFIDSTMTRRNSFSTGQVYENVIAKERRGDYLGGTVQVIPHITDEIKRRIHEGAAGYDVAIVEIGGTVGDIESLPFLEAIRQMRSQLGRNNTLFAHLSYVPYIAAAGEIKTKPTQHTVKEMLSIGLQPDILICRMDRTMPADERRKIALFCNVEERAIVGSYDVDSIYECPEMLHDQGIDNIITEQLQLNVQQADLTAWKKIVHAIQNPKHTVKIAMVGKYVDLTESYKSLIEALKHAGIHTETDVQITFVDSENIEKNKGDVSMLKDMDAILVPGGFGSRGVEGKIAAVRYARENNVPYLGICLGMQIALIEYARDVAGLKGANSTEFDLKCAAPVVALIDEWQTADGSVETRDESTDLGGTMRLGAQEVELKAGSLAAKIYGSGHIRERHRHRYEVNNNYVPTLEQAGLVIGGVSAGRERLVETIELPNHPWFFACQFHPEFTSNPRKGHPLFTAFVKAALNNKKA

SEQ ID NO: 216 - protein, 163 aa, Neisseria meningitidis
MRHILSVLIENESGAMSRVVGLFSARDYNIDSLAVAPTEDKTLSRMTIVTHGDEQVIEQITKQLNKLIEVIKVVDLNESRFVERELMLVKVRAAGKDRDEFLRLTEIYRGSIIDVTDRSYTIEITGSTDKLDSFLETVGRAQILETVRTGAAGIGRGERILKI

SEQ ID NO: 217 - protein, 371 aa, Neisseria meningitidis
MRLFKSLKNPKKTDAKLPKKSSGLNNRAAIGIDIDQHSIKMVQLSGRSLNQIQLEKYVIAKLPKNIIQGNKVQNYDQLVTYLQQAYAKLGTSCKNIIASVPQNLATIEQLTYTDKDAELDLQGFVESSISEVSSISLEEANYDYQVLSQSAAGEAVLAVASRKDEIEPLIDAFNAAGMKLSALDVDIFGQYNAYALWINHFAPELAAEKVAIFGVYAAQTYALVIQDGKILYKQETSVSEEQLNQLIQRTYQVTEEKAEEIINSPQKPSDYQESVANYFNQQITQEIQRVLQFYYTTQTADDMTDIKHILLTGEAARQEGIAQTVASQTNADVQCVHPARYFADNLKTDKQQFELDAPTLTRAFGLAVRGL

1. A composition comprising: (a) outer-membrane vesicles prepared from a first strain of Neisseria meningitidis; and (b) one or more proteins which are present in outer-membrane vesicles prepared from a second strain of Neisseria meningitidis, but which are not present in outer-membrane vesicles prepared from said first strain.

2. The composition of claim 1, wherein the protein(s) of component (b) are: (i) purified from the second strain and added to component (a); (ii) expressed recombinantly, purified, and added to component (a); or (iii) expressed by said first strain following either engineering of the first strain such that it expresses said protein(s), either (1) from its chromosomal DNA or from extrachromosomal DNA, or (2) such that existing expression of said protein(s) is up-regulated, or (3) such that trafficking of said protein(s) already expressed by the first strain is altered to direct it/them to a different cellular location, thereby causing it/them to be present in the outer-membrane vesicles.

3. A composition according to claim 1, comprising outer-membrane vesicles (OMVs) prepared from a genetically-modified first strain of Neisseria meningitidis, wherein said OMVs include one or more proteins which are (a) not present in OMVs prepared from said first strain prior to its being genetically modified, but which are (b) present in OMVs prepared from a second strain of Neisseria meningitidis.

4. The composition of claim 3, wherein the one or more protein(s) are selected from the following proteins disclosed by Tettelin et al. [Science (2000) 287:1809-1815] and deposited in the sequence databases as: NMB0007, NMB0018, NMB0031, NMB0035, NMB0051, NMB0052, NMB0088, NMB0089, NMB0109, NMB0110, NMB0124, NMB0126, NMB0130, NMB0132, NMB0138, NMB0139, NMB0143, NMB0154, NMB0157, NMB0168, NMB0171, NMB0182, NMB0204, NMB0214, NMB0219, NM0280, NMB0313, NMB0336, NMB0359, NMB0375, NMB0382, NMB0387, NMB0410, NMB0423, NMB0426, NMB0427, NMB0461, NMB0462, NMB0477, NMB0546, NMB0554, NMB0586, NMB0595, NMB0604, NMB0610, NMB0617, NMB0618, NMB0623, NMB0626, NMB0631, NMB0634, NMB0638, NMB0652, NMB0663, NMB0703, NMB0757, NMB0758, NMB0763, NMB0787, NMB0854, NMB0875, NMB0876, NMB0889, NMB0920, NMB0943, NMB0944, NMB0946, NMB0954, NMB0955, NMB0957, NMB0959, NMB0983, NMB1011, NMB1046, NMB1053, NMB1055, NMB 1124, NMB1126, NMB1127, NMB1131, NMB1153, NMB1162, NMB1164, NMB1165, NMB1191, NMB1199, NMB1201, NMB1228, NMB1240, NMB1252, NMB1285, NMB1301, NMB1313, NMB1323, NMB1332, NMB1339, NMB1341, NMB1342, NMB1358, NMB1392, NMB1429, NMB1437, NMB1445, NMB1457, NMB1460, NMB1497, NMB1506, NMB1518, NMB1533, NMB1540, NMB1554, NMB1567, NMB1572, NMB1574, NMB1576, NMB1577, NMB1594, NMB1612, NMB1642, NMB1668, NMB1684, NMB1710, NMB1714, NMB1762, NMB1796, NMB1799, NMB1808, NMB1812, NMB1849, NMB1854, NMB1855, NMB1861, NMB1869, NMB1874, NMB1903, NMB1921, NMB1934, NMB1936, NM1946, NMB1949, NMB1953, NMB1969, NMB1972, NMB1988, NMB1998, NMB2039, NMB2069, NMB2086, NMB2096, NMB2101, NMB2102, NMB2103, NMB2129, NMB2134, NMB2138, NMB2154 and NMB2159.

5. The composition of claim 4, wherein the one or more proteins are selected from: NMB0182, NMB0382, NMB0634, NMB0763, NMB1126, NMB1342, NMB1429, NMB1799 and NMB2039.

6. A lipid bilayer which includes a protein selected from: (i) a protein comprising an amino acid sequence selected from the group consisting of SEQ ID NO^{s}: 1 to 217; (ii) a protein comprising an amino acid sequence which shares at least 50% sequence identity with an amino acid sequence selected from the group consisting of SEQ ID NO^{s}: 1 to 217; (iii) a protein comprising a fragment of an amino acid sequence selected from the group consisting of SEQ ID NO^{s}: 1 to 217, wherein the fragment comprises at least 7 consecutive amino acids from the sequence; and/or (iv) a hybrid protein of formula: NH₂-A-[-X-L-]ₙ-B-COOH, wherein X is the amino acid sequence as defined in any one of (i) to (iii), L is an optional linker amino acid sequence, A is an optional N-terminal amino acid sequence, B is an optional C-terminal amino acid sequence, and n is an integer greater than 1.

7. The lipid bilayer of claim 6, in the form of a cell membrane, a liposome, a bacterial ghost, an outer membrane vesicle or a bleb.

8. The lipid bilayer of claim 6 or claim 7, which does not include at least one of the following native membrane components: a porin; lipooligosaccharide; lipopolysaccharide; PilC protein; Omp85 protein; an opacity proteins; a pilin; or P64k.

9. A protein comprising an amino acid sequence selected from the group consisting of SEQ ID NO^{s}: 1 to 217.

10. A protein comprising an amino acid sequence which shares at least 50% sequence identity with an amino acid sequence selected from the group consisting of SEQ ID NO^{s}: 1 to 217.

11. A protein comprising a fragment of an amino acid sequence selected from the group consisting of SEQ ID NO^{s}: 1 to 217, wherein the fragment comprises at least 7 consecutive amino acids from the sequence.

12. A hybrid protein of formula: NH₂-A-[-X-L-]ₙ-B-COOH, wherein X is the amino acid sequence as defined in any one of claims 1 to 3, L is an optional linker amino acid sequence, A is an optional N-terminal amino acid sequence, B is an optional C-terminal amino acid sequence, and n is an integer greater than 1.

13. Nucleic acid encoding the protein of any one of claims 9 to 12.
